(19) United States
(12) Patent Application Publication
(10) Pub. No.: US 2012/0034602 A1
(43) Pub. Date: Feb. 9, 2012

(54) Recombinant Polymerases For Improved Single Molecule Sequencing

(75) Inventors: Robin Emig, Belmont, CA (US); Insil Park, Fremont, CA (US); Lei Jia, Palo Alto, CA (US); Arek Bibillo, Cupertino, CA (US); Keith Bjornson, Union City, CA (US); Molly He, San Diego, CA (US); Jeremiah Hanes, Redwood City, CA (US); Harold Lee, Sunnyvale, CA (US); Sonya Clark, Oakland, CA (US); Fred Christians, Las Altos Hills, CA (US); Paul Peluso, East Palo Alto, CA (US); John Vieceli, San Diego, CA (US); Satwik Kamtekar, Menlo Park, CA (US); Erik Miller, San Francisco, CA (US); Colleen Cutcliffe, Menlo Park, CA (US); Walter Lee, Campbell, CA (US)

(73) Assignee: Pacific Biosciences of California, Inc., Menlo Park, CA (US)

(21) Appl. No.: 13/176,697

(22) Filed: Jul. 5, 2011

Related U.S. Application Data
(63) Continuation-in-part of application No. 12/924,701, filed on Sep. 30, 2010.
Application No. 12/924,701 is a continuation-in-part of application No. 12/384,112, filed on Mar. 30, 2009.
(60) Provisional application No. 61/399,108, filed on Jul. 6, 2010.
(60) Provisional application No. 61/278,041, filed on Sep. 30, 2009.
(60) Provisional application No. 61/072,645, filed on Mar. 31, 2008.
(60) Provisional application No. 61/094,843, filed on Sep. 5, 2008.

(51) Int. Cl. C12N 9/12; C12Q 1/68

(52) U.S. Cl. 435/6.1; 435/194

(57) ABSTRACT

Provided are compositions comprising recombinant DNA polymerases that include amino acid substitutions, insertions, deletions, and/or exogenous features that confer modified properties upon the polymerase for enhanced single molecule sequencing. Such properties can include enhanced metal ion coordination, reduced exonuclease activity, reduced reaction rates at one or more steps of the polymerase kinetic cycle, decreased branching fraction, altered cofactor selectivity, increased yield, increased thermostability, increased accuracy, increased speed, increased readlength, and the like. Also provided are nucleic acids which encode the polymerases with the aforementioned phenotypes, as well as methods of using such polymerases to make a DNA or to sequence a DNA template.

### CROSS-REFERENCE TO RELATED APPLICATIONS

[0001] This application is a non-provisional utility patent application claiming priority to and benefit of provisional patent application U.S. Ser. No. 61/399,108, filed Jul. 6, 2010, entitled “RECOMBINANT POLYMERASES FOR IMPROVED SINGLE MOLECULE SEQUENCING” by Robin Emig et al. and is a continuation-in-part of U.S. Ser. No. 12/924,701, filed Sep. 30, 2010, entitled “GENERATION OF MODIFIED POLYMERASES FOR IMPROVED ACCURACY IN SINGLE MOLECULE SEQUENCING” by Sonya Clark et al., which claims priority to and benefit of provisional application U.S. Ser. No. 61/278,041, filed Sep. 30, 2009, entitled “GENERATION OF MODIFIED POLYMERASES FOR IMPROVED ACCURACY IN SINGLE MOLECULE SEQUENCING” by Sonya Clark et al. and which is a continuation-in-part of U.S. Ser. No. 12/384,112, filed Mar. 30, 2009, entitled “GENERATION OF MODIFIED POLYMERASES FOR IMPROVED ACCURACY IN SINGLE MOLECULE SEQUENCING” by Sonya Clark et al., which claims priority to and benefit of the following prior provisional patent applications: U.S. Ser. No. 61/072,645, filed Mar. 31, 2008, entitled “GENERATION OF POLYMERASES WITH IMPROVED CLOSED COMPLEX STABILITY AND DECREASED BRANCHING RATE” by Sonya Clark et al., and U.S. Ser. No. 61/094,843, filed Sep. 5, 2008, entitled “ENGINEERING POLYMERASES FOR MODIFIED INCORPORATION PROPERTIES” by Pranav Patel et al. Each of these applications is incorporated herein by reference in its entirety for all purposes.

### BACKGROUND OF THE INVENTION

[0002] DNA polymerases replicate the genomes of living organisms. In addition to this central role in biology, DNA polymerases are also ubiquitous tools of biotechnology. They are widely used, e.g., for reverse transcription, amplification, labeling, and sequencing, all central technologies for a variety of applications such as nucleic acid sequencing, nucleic acid amplification, cloning, protein engineering, diagnostics, molecular medicine, and many other technologies.

[0003] Because of the significance of DNA polymerases, they have been extensively studied. This study has focused, e.g., on phylogenetic relationships among polymerases, structure of polymerases, structure-function features of polymerases, and the role of polymerases in DNA replication and other basic biological processes, as well as ways of using DNA polymerases in biotechnology. For a review of polymerases, see, e.g., Hübscher et al. (2002) “Eukaryotic DNA Polymerases” Annual Review of Biochemistry Vol. 71: 133-163, Alba (2001) “Protein Family Review: Replicative DNA Polymerases” Genome Biology 2(1): reviews 3002.1-3002.4, Steitz (1999) “DNA polymerases: structural diversity and common mechanisms” J Biol Chem 274:17395-17398, and Burgers et al. (2001) “Eukaryotic DNA polymerases: proposal for a revised nomenclature” J Biol. Chem. 276(47): 43487-90. Crystal structures have been solved for many polymerases, which often share a similar architecture. The basic mechanisms of action for many polymerases have been determined.

[0004] A fundamental application of DNA technology involves various labeling strategies for labeling a DNA that is produced by a DNA polymerase. This is useful in DNA sequencing, microarray technology, SNP detection, cloning, PCR analysis, and many other applications. Labeling is often performed in various post-synthesis hybridization or chemical labeling schemes, but DNA polymerases have also been used to directly incorporate various labeled nucleotides in a variety of applications, e.g., via nick translation, reverse transcription, random priming, amplification, the polymerase chain reaction, etc. See, e.g., Giller et al. (2003) “Incorporation of reporter molecule-labeled nucleotides by DNA polymerases. I. Chemical synthesis of various reporter group-labeled 2′-deoxyribonucleoside-5′-triphosphates” Nucleic Acids Res. 31(10):2630-2635, Augustin et al. (2001) “Progress towards single-molecule sequencing: enzymatic synthesis of nucleotide-specifically labeled DNA” J. Biotechnol. 86:289-301, Tonon et al. (2000) “Spectral karyotyping combined with locus-specific FISH simultaneously defines genes and chromosomes involved in chromosomal translocations” Genes Chromosom. Cancer 27:418-423, Zhu and Waggoner (1997) “Molecular mechanism controlling the incorporation of fluorescent nucleotides into DNA by PCR” Cytometry, 28:206-211, Yu et al. (1994) “Cyanine dye dUTP analogs for enzymatic labeling of DNA probes” Nucleic Acids Res. 22:3226-3232, Zhu et al. (1994) “Directly labeled DNA probes using fluorescent nucleotides with different length linkers” Nucleic Acids Res. 22:3418-3422, and Reid et al. (1992) “Simultaneous visualization of seven different DNA probes by in situ hybridization using combinatorial fluorescence and digital imaging microscopy” Proc. Natl. Acad. Sci. USA, 89:1388-1392.

[0005] DNA polymerase mutants have been identified that have a variety of useful properties, including altered nucleotide analog incorporation abilities relative to wild-type counterpart enzymes. For example, Vent^{A488L} DNA polymerase can incorporate certain non-standard nucleotides with a higher efficiency than native Vent DNA polymerase. See Gardner et al. (2004) “Comparative Kinetics of Nucleotide Analog Incorporation by Vent DNA Polymerase” J. Biol. Chem. 279(12):11834-11842 and Gardner and Jack “Determinants of nucleotide sugar recognition in an archaeon DNA polymerase” Nucleic Acids Research 27(12):2545-2553. The altered residue in this mutant, A488, is predicted to be facing away from the nucleotide binding site of the enzyme. The pattern of relaxed specificity at this position roughly correlates with the size of the substituted amino acid side chain and affects incorporation by the enzyme of a variety of modified nucleotide sugars.

[0006] Additional modified polymerases, e.g., modified polymerases that display improved properties useful for single molecule sequencing (SMS) and other polymerase applications (e.g., DNA amplification, sequencing, labeling, detection, cloning, etc.), are desirable. The present invention provides new recombinant DNA polymerases with desirable properties including one or more slow catalytic steps during the polymerase kinetic cycle relative to a wild-type or parental polymerase. The one or more slow catalytic steps can be achieved by introducing one or more functionalities into the polymerase, e.g., enhanced metal coordination, closed conformation stabilization, enhanced or destabilized interactions with certain portions of a nucleotide or nucleotide analog (e.g., the base, a phosphate group, or the label of a labeled analog), altered polyphosphate release, slower polymerase translocation, and/or strengthened or weakened interactions with the phosphate tail of a nucleotide analog. Other exemplary properties include exonuclease deficiency, increased closed complex stability, altered (e.g., reduced) branching fraction, altered cofactor selectivity, increased yield, increased thermostability, increased accuracy, increased speed, increased readlength, and the like. Also included are methods of making and using such polymerases, and many other features that will become apparent upon a complete review of the following.

### SUMMARY OF THE INVENTION

[0007] Modified DNA polymerases can find use in such applications as, e.g., single-molecule sequencing (SMS), genotyping analyses such as SNP genotyping using single-base extension methods, and real-time monitoring of amplification, e.g., RT-PCR. Among other aspects, the invention provides compositions comprising recombinant polymerases that comprise mutations which confer properties which can be particularly desirable for these applications. These properties can, e.g., facilitate readout accuracy or otherwise improve polymerase performance. Also provided by the invention are methods of generating such modified polymerases and methods in which such polymerases can be used to, e.g., sequence a DNA template and/or make a DNA.

[0008] One general class of embodiments provides a composition comprising a recombinant Φ29-type DNA polymerase, which recombinant polymerase comprises a mutation at position E375, a mutation at position K512, and a mutation at one or more positions selected from the group consisting of L253, A484, V250, E239, Y224, Y148, E508, and T368, wherein identification of positions is relative to wild-type Φ29 polymerase (SEQ ID NO:1).

[0009] Suitable mutations include amino acid substitutions, insertions, and deletions. Thus, the mutation at position E375 can be, for example, an amino acid substitution selected from the group consisting of E375Y, E375F, E375R, E375Q, E375H, E375L, E375A, E375K, E375S, E375T, E375C, E375G, and E375N. The mutation at position K512 can be, for example, an amino acid substitution selected from the group consisting of K512Y, K512F, K512I, K512M, K512C, K512E, K512G, K512H, K512N, K512Q, K512R, K512V, and K512H. In one class of embodiments, the mutation at position E375 comprises an E375Y substitution and the mutation at position K512 comprises a K512Y substitution. The polymerase optionally comprises one or more insertions of at least one amino acid (e.g., one, two or more amino acids), e.g., between positions 507 and 508, between positions 511 and 512, and/or between positions 512 and 513.

[0010] Exemplary mutations at positions L253, A484, V250, E239, Y224, Y148, E508, and T368 include, e.g., L253A, L253C, L253S, A484E, A484Q, A484N, A484D, A484K, V250I, V250Q, V250L, V250M, V250C, V250F, V250N, V250R, V250T, V250Y, E239G, Y224K, Y224Q, Y224R, Y148I, Y148A, Y148K, Y148F, Y148C, Y148D, Y148E, Y148G, Y148H, Y148K, Y148L, Y148M, Y148N, Y148P, Y148Q, Y148R, Y148S, Y148T, Y148V, Y148W, E508R, and E508K amino acid substitutions. The recombinant polymerase optionally comprises one or more such substitution. Optionally, the C-terminal region of the recombinant polymerase comprises polyhistidine tag, e.g., a His10 tag.

[0011] The polymerase can also include mutations at additional positions, for example, at one or more positions selected from the group consisting of D510, E515, F526, N62, D12, D66, K143, E14, H61, D169, Y148, and H149, wherein identification of positions is relative to wild-type Φ29 polymerase (SEQ ID NO:1). For example, the polymerase can include one or more amino acid substitutions selected from the group consisting of D510K, D510Y, D510R, D510H, D510C, E515Q, E515K, E515D, E515H, E515Y, E515C, E515M, E515N, E515P, E515R, E515S, E515T, E515V, E515A, F526L, F526Q, F526V, F526K, F526I, F526A, F526T, F526H, F526M, F526V, and F526Y.

[0012] Optionally, the polymerase comprises mutations at two or more, three or more, four or more, five or more, or even six or more of the indicated positions. As a few examples, the polymerase can comprise mutations at positions 375, 512, and 253; positions 375, 512, and 484; positions 375, 512, and 368; positions 375, 512, 253, and 484; or positions 375, 512, 253, 484, and 510.

[0013] Exemplary combinations of mutations include E375Y, K512Y, and L253A; E375Y, K512Y, and A484E; E375Y, K512Y, and T368F; L253A, E375Y, A484E, and K512Y; L253A, E375Y, A484E, D510K, and K512Y; Y148I, Y224K, E239G, V250I , L253A, E375Y, A484E, D510K, and K512Y; Y148I , Y224K, E239G, V250I , L253A, E375Y, A484E, D510K, K512Y, and E515Q; E239G, L253A, E375Y, A484E, D510K, and K512Y; Y224K, E239G, L253A, E375Y, A484E, D510K, and K512Y; Y148I , Y224K, E239G, L253C, E375Y, A484E, D510K, and K512Y; N62D, V250I , L253A, E375Y, A484E, and K512Y; Y224K, E239G, L253A, E375Y, A484E, K512Y, and F526L; L253A, E375Y, A484E, K512Y, and E515K; E239G, L253A, E375Y, A484E, E508R, and K512Y; Y148I, L253A, E375Y, A484E, and K512Y; D66R, Y148I, Y224K, E239G, V250I, L253A, E375Y, A484E, D510K, and K512Y; N62D, Y148I, Y224K, E239G, V250I , L253A, E375Y, A484E, D510K, and K512Y; K143R, Y148I, Y224K, E239G, V250I, L253A, E375Y, A484E, D510K, and K512Y; D12N, Y224K, E239G, L253A, E375Y, A484E, and K512Y; Y148F, Y224K, E239G, V250I, L253A, E375Y, A484E, D510K, and K512Y; Y148I , Y224K, E239G, V250I , L253A, E375Y, A484E, D510R, and K512Y; Y148I , Y224K, E239G, V250I , L253A, E375Y, A484E, D510H, and K512Y; and Y148I , Y224K, E239G, V250I , L253A, E375Y, A484E, E508K, D510K, and K512Y.

[0014] Additional exemplary combinations of mutations include N62D, L253A, E375Y, A484E and K512Y; N62D, L253A, E375Y and K512Y; N62D, H149M, T368F, E375Y, D510M, K512Y and D523M; N62H, E375Y, A484E, E508R and K512Y; D12R, N62H, T368F, E375Y, A484E and K512Y; D12R, T368F, E375Y, A484E, E508R, 511.1K, 511.2S, 512.1G and 512.2S; D12R, T368F, E375Y, I378W, A484E, E508R, 511.1K, 511.2S, 512.1G and 512.2S; N62D, A190E, E375Y, K422A, A484E, E508R and K512Y; N62D, I93Y, T368F, T372Y, E375Y, I378W, K478Y, A484E, E508R, 511.1K, 511.2S, K512Y, 512.1G and 512.2S; N62D, T368F, E375Y, P477Q, A484E and K512Y; N62D, T368F, E375Y, L384M, A484E and K512Y; T368F, E375Y, P477E and K512Y; A176V, T368F, E375Y and K512Y; T368F, E375Y, K422R and K512Y; N62D, E375Y, P477Q, A484E, K512Y; Y148A, E375Y, A484E and K512Y; N62D, T368F, E375Y and K512Y; T368F, E375Y and K512Y; N62D, T368F, E375Y, A484E and K512Y; I93F, T368F, E375Y, A484E and K512Y; and L253A, E375Y and K512Y.

[0015] Additional exemplary mutations and combinations are described herein or can be formed from those disclosed herein, and polymerases including such combinations are also features of the invention.

[0016] The recombinant polymerase can be a recombinant Φ29 polymerase. In one class of embodiments, the recombinant polymerase is at least 70% identical to wild-type Φ29 polymerase (SEQ ID NO:1), for example, at least 80%, at least 85%, at least 90%, at least 95%, at least 98%, or even at least 99% identical to wild-type Φ29 polymerase (SEQ ID NO:1). The recombinant polymerase optionally comprises an amino acid sequence selected from SEQ ID NOs:133-193.

[0017] In other embodiments, the recombinant polymerase is a recombinant B103, GA-1, PZA, Φ15, BS32, M2Y, Nf, G1, Cp-1, PRD1, PZE, SF5, Cp-5, Cp-7, PR4, PR5, PR722, or L17 polymerase. Thus, for example, the recombinant polymerase can be at least 70% identical to wild-type M2Y polymerase (SEQ ID NO:2), e.g., at least 80%, at least 85%, at least 90%, at least 95%, at least 98%, or even at least 99% identical to wild-type M2Y polymerase (SEQ ID NO:2).

[0018] The recombinant polymerase optionally comprises one or more exogenous features at the C-terminal and/or N-terminal region of the polymerase. Exemplary exogenous features include a polyhistidine tag, a His10 tag, a His6 tag, an alanine tag, an Ala10 tag, an Ala16 tag, a biotin ligase recognition sequence, a biotin tag, a GST tag, a BiTag, an S Tag, a SNAP-tag, an HA tag, a DSB (Sso7D) tag, a lysine tag, a NanoTag, a Cmyc tag, a tag or linker comprising the amino acids glycine and serine, a tag or linker comprising the amino acids glycine, serine, alanine and histidine, a tag or linker comprising the amino acids glycine, arginine, lysine, glutamine and proline, a plurality of polyhistidine tags, a plurality of His10 tags, a plurality of His6 tags, a plurality of alanine tags, a plurality of Ala10 tags, a plurality of Ala16 tags, a plurality of biotin tags, a plurality of GST tags, a plurality of BiTags, a plurality of S Tags, a plurality of SNAP-tags, a plurality of HA tags, a plurality of DSB (Sso7D) tags, a plurality of lysine tags, a plurality of NanoTags, a plurality of Cmyc tags, a plurality of tags or linkers comprising the amino acids glycine and serine, a plurality of tags or linkers comprising the amino acids glycine, serine, alanine and histidine, a plurality of tags or linkers comprising the amino acids glycine, arginine, lysine, glutamine and proline, biotin, avidin, one or more Factor Xa sites, one or more enterokinase sites, one or more thrombin sites, one or more antibodies or antibody domains, one or more antibody fragments, one or more antigens, one or more receptors, one or more receptor domains, one or more receptor fragments, one or more ligands, one or more dyes, one or more acceptors, one or more quenchers, and one or more DNA binding domains. The polymerase can also include a combination of such features.

[0019] In one class of embodiments, the polymerase comprises one or more exogenous features at the C-terminal region of the polymerase and one or more exogenous features at the N-terminal region of the polymerase. At least one of the one or more exogenous features at the C-terminal and N-terminal region can be the same (for example, the recombinant polymerase can comprise a polyhistidine tag (e.g., a His10 tag) at the C-terminal region and a polyhistidine tag (e.g., a His10 tag) at the N-terminal region of the polymerase), or the features can be different. Optionally, the recombinant polymerase comprises a biotin ligase recognition sequence (e.g., a Btag or variant thereof as described herein) and a polyhistidine tag (e.g., a His10 tag). As a few examples, the polymerase can include a polyhistidine tag at the C-terminal region, a biotin ligase recognition sequence and a polyhistidine tag at the N-terminal region, a biotin ligase recognition sequence and a polyhistidine tag at the N-terminal region and a polyhistidine tag at the C-terminal region, or a polyhistidine tag and a biotin ligase recognition sequence at the C-terminal region.

[0020] The composition comprising the recombinant polymerase can also include a nucleotide analog, e.g., a phosphate-labeled nucleotide analog. The analog optionally comprises a fluorophore. The analog can comprise three phosphate groups, or it can comprise four or more phosphate groups, e.g., 4-7 phosphate groups (that is, the analog can be a tetraphosphate, pentaphosphate, hexaphosphate, or septaphosphate analog). In one class of embodiments, the composition includes a nucleotide analog (e.g., a phosphate-labeled nucleotide analog) and a DNA template, and the polymerase incorporates the nucleotide analog into a copy nucleic acid in response to the DNA template. The composition can be present in a DNA sequencing system, e.g., a zero-mode waveguide (ZMW). The recombinant polymerase can be immobilized on a surface, for example, on a surface of a zero-mode waveguide, preferably in an active form.

[0021] A related class of embodiments provides methods of making a recombinant polymerase. In the methods, a parental polymerase (e.g., a wild-type or other Φ29-type polymerase) is mutated at positions E375 and K512 and at one or more positions selected from the group consisting of L253, A484, V250, E239, Y224, Y148, E508, and T368, wherein identification of positions is relative to wild-type Φ29 polymerase (SEQ ID NO:1).

[0022] Another general class of embodiments provides a composition comprising a recombinant Φ29-type DNA polymerase, which recombinant polymerase comprises one or more mutation selected from the group consisting of an amino acid substitution at position E239, an amino acid substitution at position Y224, an amino acid substitution at position Y148, E239G, Y224K, Y224Q, Y224R, Y148I , Y148A, Y148K, Y148F, Y148C, Y148D, Y148E, Y148G, Y148H, Y148K, Y148L, Y148M, Y148N, Y148P, Y148Q, Y148R, Y148S, Y148T, Y148V, Y148W, L253A, L253C, L253S, A484E, A484Q, A484N, A484D, A484K, E375T, E375C, E375G, E375N, K512I , K512M, K512C, K512G, K512N, K512Q, K512R, K512V, D510K, D510R, D510C, V250I , V250Q, V250L, V250C, V250F, V250N, V250R, V250T, V250Y, E515Q, E515D, E515H, E515Y, E515C, E515M, E515N, E515P, E515R, E515S, E515T, E515V, E515A, E508R, E508K, F526H, F526M, and F526Y, wherein identification of positions is relative to wild-type Φ29 polymerase (SEQ ID NO:1).

[0023] The recombinant polymerase can be a recombinant Φ29 polymerase. In one class of embodiments, the recombinant polymerase is at least 70% identical to wild-type Φ29 polymerase (SEQ ID NO:1), for example, at least 80%, at least 85%, at least 90%, at least 95%, at least 98%, or even at least 99% identical to wild-type Φ29 polymerase (SEQ ID NO:1).

[0024] In other embodiments, the recombinant polymerase is a recombinant B103, GA-1, PZA, Φ15, BS32, M2Y, Nf, G1, Cp-1, PRD1, PZE, SF5, Cp-5, Cp-7, PR4, PR5, PR722, or L17 polymerase. Thus, for example, the recombinant polymerase can be at least 70% identical to wild-type M2Y polymerase (SEQ ID NO:2), e.g., at least 80%, at least 85%, at least 90%, at least 95%, at least 98%, or even at least 99% identical to wild-type M2Y polymerase (SEQ ID NO:2).

[0025] Essentially all of the features noted above apply to these embodiments as well, as relevant, e.g., with respect to mutation of additional positions in the polymerase, inclusion of one or more exogenous features in the polymerase, inclusion of analogs in the composition, immobilization of the polymerase on a surface, inclusion of the composition in a DNA sequencing system, and the like.

[0026] Another general class of embodiments provides a composition comprising a recombinant Φ29-type DNA polymerase, which recombinant polymerase comprises a mutation at position A484 and a mutation at position L253, wherein identification of positions is relative to wild-type Φ29 polymerase (SEQ ID NO:1). Optionally, the polymerase comprises one or more amino acid substitutions selected from the group consisting of A484E, L253A, and L253C.

[0027] The recombinant polymerase can also include additional mutations. For example, the polymerase can comprise a mutation at one or more positions selected from the group consisting of E375, K512, V250, E239, Y224, Y148, E508, T368, D510, E515, and F526, wherein identification of positions is relative to wild-type Φ29 polymerase (SEQ ID NO:1). Optionally, the polymerase comprises mutations at two or more, three or more, four or more, five or more, or even six or more of these positions.

[0028] The recombinant polymerase can be a recombinant Φ29 polymerase. In one class of embodiments, the recombinant polymerase is at least 70% identical to wild-type Φ29 polymerase (SEQ ID NO:1), for example, at least 80%, at least 85%, at least 90%, at least 95%, at least 98%, or even at least 99% identical to wild-type Φ29 polymerase (SEQ ID NO:1).

[0029] In other embodiments, the recombinant polymerase is a recombinant B103, GA-1, PZA, Φ15, BS32, M2Y, Nf, G1, Cp-1, PRD1, PZE, SF5, Cp-5, Cp-7, PR4, PR5, PR722, or L17 polymerase. Thus, for example, the recombinant polymerase can be at least 70% identical to wild-type M2Y polymerase (SEQ ID NO:2), e.g., at least 80%, at least 85%, at least 90%, at least 95%, at least 98%, or even at least 99% identical to wild-type M2Y polymerase (SEQ ID NO:2).

[0030] Essentially all of the features noted above apply to these embodiments as well, as relevant, e.g., with respect to mutation of additional positions in the polymerase, exemplary substitutions, exemplary combinations of mutations, inclusion of one or more exogenous features in the polymerase, inclusion of analogs in the composition, immobilization of the polymerase on a surface, inclusion of the composition in a DNA sequencing system, and the like.

[0031] In one aspect, the invention provides methods of sequencing a DNA template. In the methods, a reaction mixture that includes the DNA template, a replication initiating moiety that complexes with or is integral to the template, one or more nucleotides and/or nucleotide analogs, and a recombinant polymerase of the invention (e.g., a recombinant Φ29-type DNA polymerase) is provided. The polymerase is capable of replicating at least a portion of the template using the moiety in a template-dependent polymerization reaction. The reaction mixture is subjected to a polymerization reaction in which the recombinant polymerase replicates at least a portion of the template in a template-dependent manner, whereby the one or more nucleotides and/or nucleotide analogs are incorporated into the resulting DNA. A time sequence of incorporation of the one or more nucleotides and/or nucleotide analogs into the resulting DNA is identified.

[0032] The nucleotide analogs used in the methods can comprise a first analog and a second analog (and optionally third, fourth, etc.), each of which comprise different fluorescent labels. The different fluorescent labels can optionally be distinguished from one another during the step in which a time sequence of incorporation is identified. Optionally, subjecting the reaction mixture to a polymerization reaction and identifying a time sequence of incorporation are performed in a zero mode waveguide.

[0033] In a related aspect, the invention provides methods of making a DNA. In the methods, a reaction mixture is provided that includes a template, a replication initiating moiety that complexes with or is integral to the template, one or more nucleotides and/or nucleotide analogs, and a recombinant polymerase of the invention (e.g., a recombinant Φ29-type DNA polymerase). The polymerase is capable of replicating at least a portion of the template using the moiety in a template-dependent polymerase reaction. The mixture is reacted such that the polymerase replicates at least a portion of the template in a template-dependent manner, whereby the one or more nucleotides and/or nucleotide analogs are incorporated into the resulting DNA. The reaction mixture is optionally reacted in a zero mode waveguide. The methods optionally include detecting incorporation of at least one of the nucleotides and/or nucleotide analogs.

### BRIEF DESCRIPTION OF THE DRAWINGS

[0034] FIG. 1 Panels A and B depict a closed Φ29 polymerase/DNA complex.

[0035] FIG. 2 Panels A and B depict the interface of the TPR2, thumb, and exonuclease subdomains of a Φ29 polymerase complexed with a DNA.

[0036] FIG. 3 depicts the structure of A488dA4P.

[0037] FIG. 4 illustrates a novel metal binding site observed in a crystal structure of D12A/D66A/T368F/E375Y/K512Y Φ29 polymerase complexed with hexaphosphate analog A555dG6P. The novel metal is labeled C.

[0038] FIG. 5 illustrates the structure of a Φ29 polymerase ternary complex with the polyphosphate tail of the nucleotide analog in the active conformation with tight binding (Panel A) and in the inactive conformation with loose binding (Panel B).

[0039] FIG. 6 shows a superimposition of the structure of the polymerase ternary complex with the active polyphosphate conformation and the structure with the inactive polyphosphate conformation. The polymerase surface with the inactive polyphosphate conformation is shown. Two residues (Lys383 and Asp458) which act as a “clamp” (possible steric hindrance) between the active and inactive conformations are labeled.

[0040] FIG. 7 presents the structure of Φ29 polymerase in complex with DNA and a nucleotide analog, showing the non-positively charged residues in group one. These residues are within 4 Å of the DNA.

[0041] FIG. 8 presents the structure of Φ29 polymerase in complex with DNA and a nucleotide analog, showing the positively charged residues in group two. These residues are within 4 Å of the DNA and directly or indirectly interact with the DNA backbone.

[0042] FIG. 9 Panels A and B depict the electrostatic surface of Φ29 polymerase in contact with the DNA. Positive charge is dark gray and negative charge is light gray; the intensity of the color represents the strength of the charge. The wild type of group one residues and the lysine mutants of group one residues are colored in the same scale in Panels A and B, respectively. The DNA binding interface is mainly positively charged. The positive charge on the DNA binding interface is significantly increased after the mutation of group one residues to lysine.

[0043] FIG. 10 Panels A and B depict the electrostatic surface of Φ29 polymerase in contact with the DNA. Positive charge is dark gray and negative charge is light gray; the intensity of the color represents the strength of the charge. The wild type of positively charged group two residues and the alanine mutants of group one residues are colored in the same scale in Panels A and B, respectively. The DNA binding interface is mainly positively charged. The positive charge on the DNA binding interface is significantly decreased after the mutation of group two residues to alanine.

[0044] FIG. 11 Panel A schematically illustrates an assay for determination of branching fraction. Panel B illustrates detection of primer (P) and +1 and +2 products by gel electrophoresis.

[0045] FIG. 12 schematically illustrates the catalytic cycle for polymerase-mediated nucleic acid primer extension.

[0046] FIG. 13 Panels A and B schematically illustrate an exemplary single molecule sequencing by incorporation process in which the compositions of the invention provide particular advantages.

[0047] FIG. 14 shows a theoretical representation of the probability density for residence time for a polymerase reaction having one rate limiting step or two rate limiting steps within an observable phase.

[0048] FIG. 15 shows the results of a stopped-flow experiment for a polymerase reaction system in which the decrease in the fluorescent signal fits to a single exponential and the increase in signal fits to a single exponential.

[0049] FIG. 16 shows the results of a stopped-flow experiment for a polymerase reaction system in which the decrease in the fluorescent signal fits to a single exponential and the increase in signal is best described by two exponentials.

[0050] FIG. 17 shows the results of a stopped-flow experiment for a polymerase reaction system in which the decrease in the fluorescent signal fits to a single exponential and the increase in signal fits to a single exponential.

[0051] FIG. 18 Panels A and B show the results of a stopped-flow experiment for a polymerase reaction system in which the decrease in the fluorescent signal fits to a single exponential and the increase in signal is best described by to two exponentials (Panel B), and is poorly fit by a single exponential (Panel A).

[0052] FIG. 19 Panel A depicts the unincorporatable competitive inhibitor Cbz-X-5P. Panels B and C show agarose gels of template dependent, polymerase mediated nucleic acid extension products in the presence of varying concentrations of Cbz-X-5P for two modified Φ29 polymerases.

[0053] FIG. 20 depicts a computer model showing a possible four metal ion coordination network in a polymerase comprising a A484E substitution.

[0054] FIG. 21 illustrates how S487E and A484E mutations can strengthen metal ion coordination.

[0055] FIG. 22 illustrates third metal coordination in a crystal structure of the polymerase with DNA and hexaphosphate analog A555-O-dG6P.

[0056] FIG. 23 Panels A-D illustrate active and inactive conformations found in crystal structures of the polymerase with hexaphosphate analogs.

[0057] FIG. 24 illustrates two phosphate backbone and D249 side chain conformations observed in the structure of a D12A/D66A/E375Y/K512Y/T368F/A484E Φ29 polymerase with the hexaphosphate analog A555-O-dG6P.

[0058] FIG. 25 illustrates how direct phosphate-palm domain interaction, without a third metal ion, can be achieved by substitution with basic amino acids.

[0059] FIG. 26 Panels A and B depict structural changes between the open (includes T368) and closed (includes T368F) conformations of Φ29 polymerase. Panel C depicts Φ29 polymerase.

[0060] FIG. 27 depicts the location of mutations in the finger and exonuclease domains that stabilize the closed conformation.

[0061] FIG. 28 depicts interaction of the A555 dye with the E375Y/K512Y region in the crystal structure of a D12A/D66A/E375Y/K512Y/T368F Φ29 polymerase with the hexaphosphate analog A555-O-dG6P.

[0062] FIG. 29 depicts the location of Gln380 in Φ29 and interactions with a hexaphosphate analog.

[0063] FIG. 30 depicts the leaving penta-pyrophosphate in one of the two closed conformation models. Residues interacting with the penta-pyrophosphate are also highlighted.

[0064] FIG. 31 depicts the leaving penta-pyrophosphate in the other of the two closed conformation models. Residues interacting with the penta-pyrophosphate are also highlighted.

[0065] FIG. 32 depicts the leaving penta-pyrophosphate in the open conformation model. Residues interacting with the penta-pyrophosphate are also highlighted.

[0066] FIG. 33 depicts the location of N251 and P477.

[0067] FIG. 34 provides exemplary polymerase mutations (e.g., substitutions, deletions, and insertions) and combinations thereof, relative to a wild-type Φ29 DNA polymerase, in accordance with the invention.

[0068] FIG. 35 provides exemplary polymerase mutations and combinations thereof in accordance with the invention. Positions are identified relative to wild-type Φ29 DNA polymerase.

[0069] FIG. 36 Panel A depicts a Φ29 complex, highlighting the location of residue E239. Panel B shows a close-up view of the type II turn that includes E239.

[0070] FIG. 37 Panel A shows an alignment of the amino acid sequences of Φ29, M2Y, GA-1, and AV-1 polymerases in the vicinity of residue 224 (identified with respect to Φ29). The alignment includes residues 218-229 of SEQ ID NO:1, residues 215-226 of SEQ ID NO:2, residues 218-229 of SEQ ID NO:4, and residues 230-241 of SEQ ID NO:5. Panel B depicts an in-house crystal structure of a Φ29 complex including a Y224K substitution, determined at 2.15 Å resolution with an R_{free} of 21.6%. The location of residue 224 is highlighted. Panel C shows a superposition of the structures of wild-type and the Y224K mutant Φ29 complex in the region of residue 224. A hydrogen bond is formed with E221 in the Y224K mutant polymerase (dashed line from K224 to E221) that is not seen in the wild-type polymerase (Y224).

[0071] FIG. 38 Panel A schematically illustrates a thermal inactivation assay. The gapped substrate is listed as SEQ ID NOs: 198 and 199 and the extended strand as SEQ ID NO:200. Panel B presents thermal inactivation profiles for five recombinant Φ29 polymerases.

[0072] FIG. 39 Panel A presents thermal inactivation profiles for wild-type and L253A, E375Y, A484E, and K512Y recombinant Φ29 polymerases in the presence of dATP or hexaphosphate analog. Panel B presents thermal inactivation profiles for wild-type and L253A, E375Y, A484E, and K512Y recombinant M2Y polymerases in the presence of dATP or hexaphosphate analog.

[0073] FIG. 40 presents a bar graph comparing yield from a high throughput protein purification procedure applied to comparable numbers of cells expressing six recombinant Φ29 polymerases: one with N62D, L253A, E375Y, A484E, and K512Y substitutions; one with L253A, E375Y, A484E, and K512Y substitutions and a C-terminal His 10 tag; one with L253A, E375Y, A484E, D510K, and K512Y substitutions and a C-terminal His10 tag; one with E239G, L253A, E375Y, A484E, D510K, and K512Y substitutions and a C-terminal His10 tag; one with Y224K, E239G, L253A, E375Y, A484E, D510K, and K512Y substitutions and a C-terminal His10 tag; and one with Y224K, E239G, L253A, E375Y, A484E, D510K, K512Y, and F526L substitutions and a C-terminal His10 tag. (All bear an N-terminal biotinylation site and His10 tag.)

[0074] FIG. 41 Panel A depicts the electrostatic surface of Φ29 polymerase around the analog binding site. Panel B depicts the location of exemplary residues that can be mutated to affect polymerase speed.

[0075] FIG. 42 Panel A depicts packing in the vicinity of residue 253 in an L253A Φ29 mutant polymerase whose structure was determined to 1.45 Å resolution with an R_{free} of 19.1%. Panel B depicts a 2FoFc electron density map contoured at 1.5σ.

[0076] FIG. 43 presents an alignment between the amino acid sequences of wild-type M2Y polymerase (SEQ ID NO:2) and wild-type Φ29 polymerase (SEQ ID NO:1).

[0077] FIG. 44 presents a fluorescence time trace for a ZMW, showing pulses representing incorporation of different nucleotide analogs. A pulse width and interpulse distance are illustrated on the trace. The inset schematically illustrates the catalytic cycle for polymerase-mediated extension; the box indicates the portion of the catalytic cycle that corresponds to the pulse when sequencing is performed with phosphate-labeled nucleotide analogs. The remainder of the cycle corresponds to the interpulse distance.

### DEFINITIONS

[0078] Unless defined otherwise, all technical and scientific terms used herein have the same meaning as commonly understood by one of ordinary skill in the art to which the invention pertains. The following definitions supplement those in the art and are directed to the current application and are not to be imputed to any related or unrelated case, e.g., to any commonly owned patent or application. Although any methods and materials similar or equivalent to those described herein can be used in the practice for testing of the present invention, the preferred materials and methods are described herein. Accordingly, the terminology used herein is for the purpose of describing particular embodiments only, and is not intended to be limiting.

[0079] As used in this specification and the appended claims, the singular forms “a,” “an” and “the” include plural referents unless the context clearly dictates otherwise. Thus, for example, reference to “a protein” includes a plurality of proteins; reference to “a cell” includes mixtures of cells, and the like.

[0080] The term “about” as used herein indicates the value of a given quantity varies by +/−10% of the value, or optionally +/−5% of the value, or in some embodiments, by +/−1% of the value so described.

[0081] The term “nucleic acid” or “polynucleotide” encompasses any physical string of monomer units that can be corresponded to a string of nucleotides, including a polymer of nucleotides (e.g., a typical DNA or RNA polymer), PNAs, modified oligonucleotides (e.g., oligonucleotides comprising nucleotides that are not typical to biological RNA or DNA, such as 2′-O-methylated oligonucleotides), and the like. A nucleic acid can be e.g., single-stranded or double-stranded. Unless otherwise indicated, a particular nucleic acid sequence of this invention encompasses complementary sequences, in addition to the sequence explicitly indicated.

[0082] A “polypeptide” is a polymer comprising two or more amino acid residues (e.g., a peptide or a protein). The polymer can additionally comprise non-amino acid elements such as labels, quenchers, blocking groups, or the like and can optionally comprise modifications such as glycosylation or the like. The amino acid residues of the polypeptide can be natural or non-natural and can be unsubstituted, unmodified, substituted or modified.

[0083] An “amino acid sequence” is a polymer of amino acid residues (a protein, polypeptide, etc.) or a character string representing an amino acid polymer, depending on context.

[0084] A “polynucleotide sequence” or “nucleotide sequence” is a polymer of nucleotides (an oligonucleotide, a DNA, a nucleic acid, etc.) or a character string representing a nucleotide polymer, depending on context. From any specified polynucleotide sequence, either the given nucleic acid or the complementary polynucleotide sequence (e.g., the complementary nucleic acid) can be determined.

[0085] Numbering of a given amino acid or nucleotide polymer “corresponds to numbering of” or is “relative to” a selected amino acid polymer or nucleic acid when the position of any given polymer component (amino acid residue, incorporated nucleotide, etc.) is designated by reference to the same residue position in the selected amino acid or nucleotide polymer, rather than by the actual position of the component in the given polymer. Similarly, identification of a given position within a given amino acid or nucleotide polymer is “relative to” a selected amino acid or nucleotide polymer when the position of any given polymer component (amino acid residue, incorporated nucleotide, etc.) is designated by reference to the residue name and position in the selected amino acid or nucleotide polymer, rather than by the actual name and position of the component in the given polymer. Correspondence of positions is typically determined by aligning the relevant amino acid or polynucleotide sequences. For example, residue K221 of wild-type M2Y polymerase (SEQ ID NO:2) is identified as position Y224 relative to wild-type Φ29 polymerase (SEQ ID NO:1); see, e.g., the alignment shown in FIG. 43.

[0086] The term “recombinant” indicates that the material (e.g., a nucleic acid or a protein) has been artificially or synthetically (non-naturally) altered by human intervention. The alteration can be performed on the material within, or removed from, its natural environment or state. For example, a “recombinant nucleic acid” is one that is made by recombining nucleic acids, e.g., during cloning, DNA shuffling or other procedures, or by chemical or other mutagenesis; a “recombinant polypeptide” or “recombinant protein” is, e.g., a polypeptide or protein which is produced by expression of a recombinant nucleic acid.

[0087] A “Φ29-type DNA polymerase” (or “phi29-type DNA polymerase”) is a DNA polymerase from the Φ29 phage or from one of the related phages that, like Φ29, contain a terminal protein used in the initiation of DNA replication. Φ29-type DNA polymerases are homologous to the Φ29 DNA polymerase (e.g., as listed in SEQ ID NO:1); examples include the B103, GA-1, PZA, Φ15, BS32, M2Y (also known as M2), Nf, G1, Cp-1, PRD1, PZE, SF5, Cp-5, Cp-7, PR4, PR5, PR722, L17, and AV-1 DNA polymerases, as well as chimeras thereof. A modified recombinant Φ29-type DNA polymerase includes one or more mutations relative to naturally-occurring wild-type Φ29-type DNA polymerases, for example, one or more mutations that increase closed complex stability, decrease branching fraction, slow a catalytic step relative to a corresponding wild-type polymerase, and/or alter another polymerase property, and may include additional alterations or modifications over the wild-type Φ29-type DNA polymerase, such as one or more deletions, insertions, and/or fusions of additional peptide or protein sequences (e.g., for immobilizing the polymerase on a surface or otherwise tagging the polymerase enzyme).

[0088] A variety of additional terms are defined or otherwise characterized herein.

### DETAILED DESCRIPTION

[0089] One aspect of the invention is generally directed to compositions comprising a recombinant polymerase, e.g., a recombinant Φ29-type DNA polymerase, that includes one or more mutations as compared to a reference polymerase, e.g., a wild-type Φ29-type polymerase. Depending on the particular mutation or combination of mutations, the polymerase exhibits one or more properties that find use in, e.g., single molecule sequencing applications. Exemplary properties exhibited by various polymerases of the invention include a reduction in the rate of one or more steps of the polymerase kinetic cycle (resulting from, e.g., enhanced interaction of the polymerase with nucleotide analog, enhanced metal coordination, and other features described in detail below), increased closed complex stability, an altered branching fraction, reduced or eliminated exonuclease activity, altered cofactor selectivity, and increased processivity, yield, thermostability, accuracy, speed, and/or readlength, as well as other features that will become apparent upon a complete review of the present disclosure. The polymerases can include one or more exogenous or heterologous features at the N- and/or C-terminal regions of the polymerase. Such features find use not only for purification of the recombinant polymerase and/or immobilization of the polymerase to a substrate, but can also alter one or more properties of the polymerase.

[0090] Among other aspects, the present invention provides new polymerases that incorporate nucleotide analogs, such as dye labeled phosphate labeled analogs, into a growing template copy during DNA amplification. These polymerases are modified such that they have one or more desirable properties, for example, decreased branching fraction formation when incorporating the relevant analogs, improved DNA-polymerase stability or processivity, reduced exonuclease activity, increased thermostability and/or yield, altered cofactor selectivity, improved accuracy, speed, and/or readlength, and/or altered kinetic properties as compared to corresponding wild-type or other parental polymerases (e.g., polymerases from which modified recombinant polymerases of the invention were derived, e.g., by mutation). The polymerases of the invention can also include any of the additional features for improved specificity, improved processivity, improved retention time, improved surface stability, affinity tagging, and/or the like noted herein.

[0091] These new polymerases are particularly well suited to DNA amplification and/or sequencing applications, particularly sequencing protocols that include detection in real time of the incorporation of labeled analogs into DNA amplicons, since the altered rates, reduced or eliminated exonuclease activity, decreased branch fraction, improved complex stability, altered metal cofactor selectivity, or the like can facilitate discrimination of nucleotide incorporation events from non-incorporation events such as transient binding of a mismatched nucleotide in the active site of the complex, improve processivity, and/or facilitate detection of incorporation events.

[0092] Polymerases of the invention include, for example, a recombinant Φ29-type DNA polymerase that comprises a mutation at one or more positions selected from the group consisting of E375, K512, L253, A484, V250, E239, Y224, Y148, E508, T368, D510, E515, F526, N62, D12, D66, and K143, where identification of positions is relative to wild-type Φ29 polymerase (SEQ ID NO:1). Optionally, the polymerase comprises mutations at two or more, three or more, four or more, five or more, or even six or more of these positions. For example, the polymerase can include a mutation at position E375, a mutation at position K512, and a mutation at one or more positions selected from the group consisting of L253, A484, V250, E239, Y224, Y148, E508, and T368, and can optionally also include a mutation at one or more of positions D510, E515, F526, N62, D12, D66, and K143. As a few examples, the polymerase can comprise mutations at positions 375, 512, and 253; positions 375, 512, and 484; positions 375, 512, and 368; positions 375, 512, 253, and 484; or positions 375, 512, 253, 484, and 510. As another example, the polymerase can comprise a mutation at position A484 and a mutation at position L253. A number of exemplary substitutions at these (and other) positions are described herein.

[0093] The polymerase mutations and mutational strategies noted herein can be combined with each other and with essentially any other available mutations and mutational strategies to confer additional improvements in, e.g., nucleotide analog specificity, enzyme processivity, improved retention time of labeled nucleotides in polymerase-DNA-nucleotide complexes, and the like. For example, the mutations and mutational strategies herein can be combined with those taught in, e.g., WO 2007/076057 POLYMERASES FOR NUCLEOTIDE ANALOGUE INCORPORATION by Hanzel et al., WO 2008/051530 POLYMERASE ENZYMES AND REAGENTS FOR ENHANCED NUCLEIC ACID SEQUENCING by Rank et al., and U.S. patent application Ser. No. 12/584,481 filed Sep. 4, 2009, by Pranav Patel et al. entitled “ENGINEERING POLYMERASES AND REACTION CONDITIONS FOR MODIFIED INCORPORATION PROPERTIES.” This combination of mutations/mutational strategies can be used to impart several simultaneous improvements to a polymerase (e.g., decreased branch fraction formation, improved specificity, improved processivity, altered rates, improved retention time, improved stability of the closed complex, tolerance for a particularly preferred metal cofactor, etc.). In addition, polymerases can be further modified for application-specific reasons, such as to increase photostability, e.g., as taught in U.S. patent application Ser. No. 12/384,110 filed Mar. 30, 2009, by Keith Bjornson et al. entitled “Enzymes Resistant to Photodamage,” to improve activity of the enzyme when bound to a surface, as taught, e.g., in WO 2007/075987 ACTIVE SURFACE COUPLED POLYMERASES by Hanzel et al. and WO 2007/076057 PROTEIN ENGINEERING STRATEGIES TO OPTIMIZE ACTIVITY OF SURFACE ATTACHED PROTEINS by Hanzel et al., or to include purification or handling tags as is taught in the cited references and as is common in the art. Similarly, the modified polymerases described herein can be employed in combination with other strategies to improve polymerase performance, for example, reaction conditions for controlling polymerase rate constants such as taught in U.S. patent application Ser. No. 12/414,191 filed Mar. 30, 2009, and entitled “Two slow-step polymerase enzyme systems and methods,” incorporated herein by reference in its entirety for all purposes.

[0094] Also taught are approaches for modifying polymerases to enhance one or more properties exhibited by the polymerases, or to confer an additional property not provided by a starting combination of mutations. For example, provided below are approaches for structure-based design of additional polymerase functionalities or activities, approaches for determining the kinetic parameters or other properties of modified recombinant polymerases of the invention, and screening methods (including high-throughput screening methods) for identifying polymerases with the one or more desired properties.

### DNA Polymerases

[0095] DNA polymerases that can be modified to have reduced reaction rates, reduced or eliminated exonuclease activity, decreased branch fraction, improved complex stability, altered metal cofactor selectivity, and/or other desirable properties as described herein are generally available. DNA polymerases are sometimes classified into six main groups based upon various phylogenetic relationships, e.g., with E. coli Pol I (class A), E. coli Pol II (class B), E. coli Pol III (class C), Euryarchaeotic Pol II (class D), human Pol beta (class X), and E. coli UmuC/DinB and eukaryotic RAD30/xeroderma pigmentosum variant (class Y). For a review of recent nomenclature, see, e.g., Burgers et al. (2001) “Eukaryotic DNA polymerases: proposal for a revised nomenclature” J Biol. Chem. 276(47):43487-90. For a review of polymerases, see, e.g., Hübscher et al. (2002) “Eukaryotic DNA Polymerases” Annual Review of Biochemistry Vol. 71: 133-163; Alba (2001) “Protein Family Review: Replicative DNA Polymerases” Genome Biology 2(1): reviews 3002.1-3002.4; and Steitz (1999) “DNA polymerases: structural diversity and common mechanisms” J Biol Chem 274:17395-17398. The basic mechanisms of action for many polymerases have been determined. The sequences of literally hundreds of polymerases are publicly available, and the crystal structures for many of these have been determined or can be inferred based upon similarity to solved crystal structures for homologous polymerases. For example, the crystal structure of Φ29, a preferred type of parental enzyme to be modified according to the invention, is available.

[0096] In addition to wild-type polymerases, chimeric polymerases made from a mosaic of different sources can be used. For example, Φ29-type polymerases made by taking sequences from more than one parental polymerase into account can be used as a starting point for mutation to produce the polymerases of the invention. Chimeras can be produced, e.g., using consideration of similarity regions between the polymerases to define consensus sequences that are used in the chimera, or using gene shuffling technologies in which multiple Φ29-related polymerases are randomly or semi-randomly shuffled via available gene shuffling techniques (e.g., via “family gene shuffling”; see Crameri et al. (1998) “DNA shuffling of a family of genes from diverse species accelerates directed evolution” Nature 391:288-291; Clackson et al. (1991) “Making antibody fragments using phage display libraries” Nature 352:624-628; Gibbs et al. (2001) “Degenerate oligonucleotide gene shuffling (DOGS): a method for enhancing the frequency of recombination with family shuffling” Gene 271:13-20; and Hiraga and Arnold (2003) “General method for sequence-independent site-directed chimeragenesis: J. Mol. Biol. 330:287-296). In these methods, the recombination points can be predetermined such that the gene fragments assemble in the correct order. However, the combinations, e.g., chimeras, can be formed at random. For example, using methods described in Clarkson et al., five gene chimeras, e.g., comprising segments of a Phi29 polymerase, a PZA polymerase, a M2 polymerase, a B103 polymerase, and a GA-1 polymerase, can be generated. Appropriate mutations to improve branching fraction, increase closed complex stability, or alter reaction rate constants or another desirable property can be introduced into the chimeras.

[0097] Available DNA polymerase enzymes have also been modified in any of a variety of ways, e.g., to reduce or eliminate exonuclease activities (many native DNA polymerases have a proof-reading exonuclease function that interferes with, e.g., sequencing applications), to simplify production by making protease digested enzyme fragments such as the Klenow fragment recombinant, etc. As noted, polymerases have also been modified to confer improvements in specificity, processivity, and retention time of labeled nucleotides in polymerase-DNA-nucleotide complexes (e.g., WO 2007/076057 POLYMERASES FOR NUCLEOTIDE ANALOGUE INCORPORATION by Hanzel et al. and WO 2008/051530 POLYMERASE ENZYMES AND REAGENTS FOR ENHANCED NUCLEIC ACID SEQUENCING by Rank et al.), to alter branching fraction and translocation (e.g., U.S. patent application Ser. No. 12/584,481 filed Sep. 4, 2009, by Pranav Patel et al. entitled “ENGINEERING POLYMERASES AND REACTION CONDITIONS FOR MODIFIED INCORPORATION PROPERTIES”), to increase photostability (e.g., U.S. patent application Ser. No. 12/384,110 filed Mar. 30, 2009, by Keith Bjornson et al. entitled “Enzymes Resistant to Photodamage”), and to improve surface-immobilized enzyme activities (e.g., WO 2007/075987 ACTIVE SURFACE COUPLED POLYMERASES by Hanzel et al. and WO 2007/076057 PROTEIN ENGINEERING STRATEGIES TO OPTIMIZE ACTIVITY OF SURFACE ATTACHED PROTEINS by Hanzel et al.). Any of these available polymerases can be modified in accordance with the invention.

[0098] Many such polymerases that are suitable for modification are available, e.g., for use in sequencing, labeling, and amplification technologies. For example, human DNA Polymerase Beta is available from R&D systems. DNA polymerase I is available from Epicenter, GE Health Care, Invitrogen, New England Biolabs, Promega, Roche Applied Science, Sigma Aldrich, and many others. The Klenow fragment of DNA Polymerase I is available in both recombinant and protease digested versions, from, e.g., Ambion, Chimerx, eEnzyme LLC, GE Health Care, Invitrogen, New England Biolabs, Promega, Roche Applied Science, Sigma Aldrich and many others. Φ29 DNA polymerase is available from e.g., Epicentre. Poly A polymerase, reverse transcriptase, Sequenase, SP6 DNA polymerase, T4 DNA polymerase, T7 DNA polymerase, and a variety of thermostable DNA polymerases (Taq, hot start, titanium Taq, etc.) are available from a variety of these and other sources. Recent commercial DNA polymerases include Phusion™ High-Fidelity DNA Polymerase, available from New England Biolabs; GoTaq® Flexi DNA Polymerase, available from Promega; RepliPHI™ Φ29 DNA Polymerase, available from Epicentre Biotechnologies; PfuUltra™ Hotstart DNA Polymerase, available from Stratagene; KOD HiFi DNA Polymerase, available from Novagen; and many others. Biocompare(dot)com provides comparisons of many different commercially available polymerases.

[0099] DNA polymerases that are preferred substrates for mutation to reduce reaction rates, reduce or eliminate exonuclease activity, decrease branching fraction, improve closed complex stability, alter metal cofactor selectivity, and/or alter one or more other property described herein include Taq polymerases, exonuclease deficient Taq polymerases, E. coli DNA Polymerase 1, Klenow fragment, reverse transcriptases, Φ29 related polymerases including wild type Φ29 polymerase and derivatives of such polymerases such as exonuclease deficient forms, T7 DNA polymerase, T5 DNA polymerase, RB69 polymerase, etc.

[0100] In one aspect, the polymerase that is modified is a Φ29-type DNA polymerase. For example, the modified recombinant DNA polymerase can be homologous to a wild-type or exonuclease deficient Φ29 DNA polymerase, e.g., as described in U.S. Pat. Nos. 5,001,050, 5,198,543, or 5,576,204. Alternately, the modified recombinant DNA polymerase can be homologous to other Φ29-type DNA polymerases, such as B103, GA-1, PZA, Φ15, BS32, M2Y (also known as M2), Nf, G1, Cp-1, PRD1, PZE, SF5, Cp-5, Cp-7, PR4, PR5, PR722, L17, AV-1, Φ21, or the like. For nomenclature, see also, Meijer et al. (2001) “Φ29 Family of Phages” Microbiology and Molecular Biology Reviews, 65(2):261-287. See, e.g., SEQ ID NO:1 for the amino acid sequence of wild-type Φ29 polymerase, SEQ ID NO:2 for the amino acid sequence of wild-type M2Y polymerase, SEQ ID NO:3 for the amino acid sequence of wild-type B103 polymerase, SEQ ID NO:4 for the amino acid sequence of wild-type GA-1 polymerase, SEQ ID NO:5 for the amino acid sequence of wild-type AV-1 polymerase, and SEQ ID NO:6 for the amino acid sequence of wild-type CP-1 polymerase.

### Nucleotide Analogs

[0101] As discussed, various polymerases of the invention can incorporate one or more nucleotide analogs into a growing oligonucleotide chain. Upon incorporation, the analog can leave a residue that is the same as or different than a natural nucleotide in the growing oligonucleotide (the polymerase can incorporate any non-standard moiety of the analog, or can cleave it off during incorporation into the oligonucleotide). A “nucleotide analog” herein is a compound, that, in a particular application, functions in a manner similar or analogous to a naturally occurring nucleoside triphosphate (a “nucleotide”), and does not otherwise denote any particular structure. A nucleotide analog is an analog other than a standard naturally occurring nucleotide, i.e., other than A, G, C, T, or U, though upon incorporation into the oligonucleotide, the resulting residue in the oligonucleotide can be the same as (or different from) an A, G, C, T, or U residue.

[0102] In one useful aspect of the invention, nucleotide analogs can also be modified to achieve any of the improved properties desired. For example, various linkers or other substituents can be incorporated into analogs that have the effect of reducing branching fraction, improving processivity, or altering rates. Modifications to the analogs can include extending the phosphate chains, e.g., to include a tetra-, penta-, hexa- or heptaphosphate group, and/or adding chemical linkers to extend the distance between the nucleotide base and the dye molecule, e.g., a fluorescent dye molecule. Substitution of one or more non-bridging oxygen in the polyphosphate, for example with S or BH₃, can change the polymerase reaction kinetics, e.g., to achieve a system having two slow steps as described hereinbelow. Optionally, one or more, two or more, three or more, or four or more non-bridging oxygen atoms in the polyphosphate group of the analog has an S substituted for an O. While not being bound by theory, it is believed that the properties of the nucleotide, such as the metal chelation properties, electronegativity, or steric properties, can be altered by substitution of the non-bridging oxygen(s).

[0103] Many nucleotide analogs are available and can be incorporated by the polymerases of the invention. These include analog structures with core similarity to naturally occurring nucleotides, such as those that comprise one or more substituent on a phosphate, sugar, or base moiety of the nucleoside or nucleotide relative to a naturally occurring nucleoside or nucleotide. In one embodiment, the nucleotide analog includes three phosphate containing groups; for example, the analog can be a labeled nucleoside triphosphate analog and/or an α-thiophosphate nucleotide analog having three phosphate groups. In one embodiment, a nucleotide analog can include one or more extra phosphate containing groups, relative to a nucleoside triphosphate. For example, a variety of nucleotide analogs that comprise, e.g., from 4-6 or more phosphates are described in detail in U.S. patent application Ser. No. 11/241,809, filed Sep. 29, 2005, and incorporated herein by reference in its entirety for all purposes. Other exemplary useful analogs, including tetraphosphate and pentaphosphate analogs, are described in U.S. Pat. No. 7,041,812, incorporated herein by reference in its entirety for all purposes.

[0104] For example, the analog can include a labeled compound of the formula:

[chemical structure]

wherein B is a nucleobase (and optionally includes a label); S is selected from a sugar moiety, an acyclic moiety or a carbocyclic moiety (and optionally includes a label); L is an optional detectable label; R₁ is selected from O and S; R₂, R₃ and R₄ are independently selected from O, NH, S, methylene, substituted methylene, C(O), C(CH₂), CNH₂, CH₂CH₂, C(OH)CH₂R where R is 4-pyridine or 1-imidazole, provided that R₄ may additionally be selected from

[chemical structure]

R₅, R₆, R₇, R₈, R₁₁ and R₁₃ are, when present, each independently selected from O, BH₃, and S; and R₉, R₁₀ and R₁₂ are independently selected from O, NH, S, methylene, substituted methylene, CNH₂, CH₂CH₂, and C(OH)CH₂R where R is 4-pyridine or 1-imidazole. In some cases, phosphonate analogs may be employed as the analogs, e.g., where one of R₂, R₃, R₄, R₉, R₁₀ or R₁₂ are not O, e.g., they are methyl etc. See, e.g., U.S. patent application Ser. No. 11/241,809, previously incorporated herein by reference in its entirety for all purposes.

[0105] The base moiety incorporated into the analog is generally selected from any of the natural or non-natural nucleobases or nucleobase analogs, including, e.g., purine or pyrimidine bases that are routinely found in nucleic acids and available nucleic acid analogs, including adenine, thymine, guanine, cytidine, uracil, and in some cases, inosine. As noted, the base optionally includes a label moiety. For convenience, nucleotides and nucleotide analogs are generally referred to based upon their relative analogy to naturally occurring nucleotides. As such, an analog that operates, functionally, like adenosine triphosphate, may be generally referred to herein by the shorthand letter A. Likewise, the standard abbreviations of T, G, C, U and I, may be used in referring to analogs of naturally occurring nucleosides and nucleotides typically abbreviated in the same fashion. In some cases, a base may function in a more universal fashion, e.g., functioning like any of the purine bases in being able to hybridize with any pyrimidine base, or vice versa. The base moieties used in the present invention may include the conventional bases described herein or they may include such bases substituted at one or more side groups, or other fluorescent bases or base analogs, such as 1,N6 ethenoadenosine or pyrrolo C, in which an additional ring structure renders the B group neither a purine nor a pyrimidine. For example, in certain cases, it may be desirable to substitute one or more side groups of the base moiety with a labeling group or a component of a labeling group, such as one of a donor or acceptor fluorophore, or other labeling group. Examples of labeled nucleobases and processes for labeling such groups are described in, e.g., U.S. Pat. Nos. 5,328,824 and 5,476,928, each of which is incorporated herein by reference in its entirety for all purposes.

[0106] In the analogs, the S group is optionally a sugar moiety that provides a suitable backbone for a synthesizing nucleic acid strand. For example, the sugar moiety is optionally selected from a D-ribosyl, 2′ or 3′ D-deoxyribosyl, 2′,3′-D-dideoxyribosyl, 2′,3′-D-didehydrodideoxyribosyl, 2′ or 3′ alkoxyribosyl, 2′ or 3′ aminoribosyl, 2′ or 3′ mercaptoribosyl, 2′ or 3′ alkothioribosyl, acyclic, carbocyclic or other modified sugar moieties. A variety of carbocyclic or acyclic moieties can be incorporated as the “S” group in place of a sugar moiety, including, e.g., those described in U.S. Patent Application Publication No. 2003/0124576, which is incorporated herein by reference in its entirety for all purposes.

[0107] For most cases, the phosphorus containing chain in the analogs, e.g., a triphosphate in conventional NTPs, is preferably coupled to the 5′ hydroxyl group, as in natural nucleoside triphosphates. However, in some cases, the phosphorus containing chain is linked to the S group by the 3′ hydroxyl group.

[0108] L generally refers to a detectable labeling group that is coupled to the terminal phosphorus atom via the R₄ (or R₁₀ or R₁₂ etc.) group. The labeling groups employed in the analogs of the invention may comprise any of a variety of detectable labels. Detectable labels generally denote a chemical moiety that provides a basis for detection of the analog compound separate and apart from the same compound lacking such a labeling group. Examples of labels include, e.g., optical labels, e.g., labels that impart a detectable optical property to the analog, electrochemical labels, e.g., labels that impart a detectable electrical or electrochemical property to the analog, and physical labels, e.g., labels that impart a different physical or spatial property to the analog, e.g., a mass tag or molecular volume tag. In some cases individual labels or combinations may be used that impart more than one of the aforementioned properties to the analogs of the invention.

[0109] Optionally, the labeling groups incorporated into the analogs comprise optically detectable moieties, such as luminescent, chemiluminescent, fluorescent, fluorogenic, chromophoric and/or chromogenic moieties, with fluorescent and/or fluorogenic labels being preferred. A variety of different label moieties are readily employed in nucleotide analogs. Such groups include fluorescein labels, rhodamine labels, cyanine labels (i.e., Cy3, Cy5, and the like, generally available from the Amersham Biosciences division of GE Healthcare), the Alexa family of fluorescent dyes and other fluorescent and fluorogenic dyes available from Molecular Probes/Invitrogen, Inc. and described in ‘The Handbook—A Guide to Fluorescent Probes and Labeling Technologies, Tenth Edition’ (2005) (available from Invitrogen, Inc./Molecular Probes). A variety of other fluorescent and fluorogenic labels for use with nucleoside polyphosphates, and which would be applicable to the nucleotide analogs incorporated by the polymerases of the present invention, are described in, e.g., U.S. Patent Application Publication No. 2003/0124576, previously incorporated herein by reference in its entirety for all purposes.

[0110] Additional details regarding analogs and methods of making such analogs can be found in U.S. patent application Ser. No. 11/241,809, filed Sep. 29, 2005, and incorporated herein by reference in its entirety for all purposes.

[0111] Thus, in one illustrative example, the analog can be a phosphate analog (e.g., an analog that has more than the typical number of phosphates found in nucleoside triphosphates) that includes, e.g., an Alexa dye label. For example, an Alexa488 dye can be labeled on a delta phosphate of a tetraphosphate analog (denoted, e.g., A488dC4P or A488dA4P, shown in FIG. 3, for the Alexa488 labeled tetraphosphate analogs of C and A, respectively), or an Alexa568 or Alexa633 dye can be used (e.g., A568dC4P and A633dC4P, respectively, for labeled tetraphosphate analogs of C or A568dT6P for a labeled hexaphosphate analog of T), or an Alexa546 dye can be used (e.g., A546dG4P), or an Alexa594 dye can be used (e.g., A594dT4P). As additional examples, an Alexa555 dye (e.g., A555dC6P or A555dA6P), an Alexa 647 dye (e.g., A647dG6P), an Alexa 568 dye (e.g., A568dT6P), and/or an Alexa660 dye (e.g., A660dA6P or A660dC6P) can be used in, e.g., single molecule sequencing. Similarly, to facilitate color separation, a pair of fluorophores exhibiting FRET (fluorescence resonance energy transfer) can be labeled on a delta phosphate of a tetraphosphate analog (denoted, e.g., FAM-amb-A532dG4P or FAM-amb-A594dT4P).

### Applications for Enhanced Nucleic Acid Amplification and Sequencing

[0112] Polymerases of the invention, e.g., modified recombinant polymerases, are optionally used in combination with nucleotides and/or nucleotide analogs and nucleic acid templates (DNA or RNA) to copy the template nucleic acid. That is, a mixture of the polymerase, nucleotides/analogs, and optionally other appropriate reagents, the template and a replication initiating moiety (e.g., primer) is reacted such that the polymerase synthesizes nucleic acid (e.g., extends the primer) in a template-dependent manner. The replication initiating moiety can be a standard oligonucleotide primer, or, alternatively, a component of the template, e.g., the template can be a self-priming single stranded DNA, a nicked double stranded DNA, or the like. Similarly, a terminal protein can serve as an initiating moiety. At least one nucleotide analog can be incorporated into the DNA. The template DNA can be a linear or circular DNA, and in certain applications, is desirably a circular template (e.g., for rolling circle replication or for sequencing of circular templates). Optionally, the composition can be present in an automated DNA replication and/or sequencing system.

[0113] Incorporation of labeled nucleotide analogs by the polymerases of the invention is particularly useful in a variety of different nucleic acid analyses, including real-time monitoring of DNA polymerization. The label can itself be incorporated, or more preferably, can be released during incorporation of the analog. For example, analog incorporation can be monitored in real-time by monitoring label release during incorporation of the analog by the polymerase. The portion of the analog that is incorporated can be the same as a natural nucleotide, or can include features of the analog that differ from a natural nucleotide.

[0114] In general, label incorporation or release can be used to indicate the presence and composition of a growing nucleic acid strand, e.g., providing evidence of template replication/amplification and/or sequence of the template. Signaling from the incorporation can be the result of detecting labeling groups that are liberated from the incorporated analog, e.g., in a solid phase assay, or can arise upon the incorporation reaction. For example, in the case of FRET labels where a bound label is quenched and a free label is not, release of a label group from the incorporated analog can give rise to a fluorescent signal. Alternatively, the enzyme may be labeled with one member of a FRET pair proximal to the active site, and incorporation of an analog bearing the other member will allow energy transfer upon incorporation. The use of enzyme bound FRET components in nucleic acid sequencing applications is described, e.g., in U.S. Patent Application Publication No. 2003/0044781, incorporated herein by reference.

[0115] In one example reaction of interest, a polymerase reaction can be isolated within an extremely small observation volume that effectively results in observation of individual polymerase molecules. As a result, the incorporation event provides observation of an incorporating nucleotide analog that is readily distinguishable from non-incorporated nucleotide analogs. In a preferred aspect, such small observation volumes are provided by immobilizing the polymerase enzyme within an optical confinement, such as a Zero Mode Waveguide (ZMW). For a description of ZMWs and their application in single molecule analyses, and particularly nucleic acid sequencing, see, e.g., U.S. Patent Application Publication No. 2003/0044781, and U.S. Pat. No. 6,917,726, each of which is incorporated herein by reference in its entirety for all purposes. See also Levene et al. (2003) “Zero-mode waveguides for single-molecule analysis at high concentrations” Science 299:682-686, Eid et al. (2009) “Real-time DNA sequencing from single polymerase molecules” Science 323:133-138, and U.S. Pat. Nos. 7,056,676, 7,056,661, 7,052,847, and 7,033,764, the full disclosures of which are incorporated herein by reference in their entirety for all purposes.

[0116] In general, a polymerase enzyme is complexed with the template strand in the presence of one or more nucleotides and/or one or more nucleotide analogs. For example, in certain embodiments, labeled analogs are present representing analogous compounds to each of the four natural nucleotides, A, T, G and C, e.g., in separate polymerase reactions, as in classical Sanger sequencing, or multiplexed together, e.g., in a single reaction, as in multiplexed sequencing approaches. When a particular base in the template strand is encountered by the polymerase during the polymerization reaction, it complexes with an available analog that is complementary to such nucleotide, and incorporates that analog into the nascent and growing nucleic acid strand. In one aspect, incorporation can result in a label being released, e.g., in polyphosphate analogs, cleaving between the α and β phosphorus atoms in the analog, and consequently releasing the labeling group (or a portion thereof). The incorporation event is detected, either by virtue of a longer presence of the analog and, thus, the label, in the complex, or by virtue of release of the label group into the surrounding medium. Where different labeling groups are used for each of the types of analogs, e.g., A, T, G or C, identification of a label of an incorporated analog allows identification of that analog and consequently, determination of the complementary nucleotide in the template strand being processed at that time. Sequential reaction and monitoring permits real-time monitoring of the polymerization reaction and determination of the sequence of the template nucleic acid. As noted above, in particularly preferred aspects, the polymerase enzyme/template complex is provided immobilized within an optical confinement that permits observation of an individual complex, e.g., a zero mode waveguide. For additional information on single molecule sequencing monitoring incorporation of phosphate-labeled analogs in real time, see, e.g., Eid et al. (2009) “Real-time DNA sequencing from single polymerase molecules” Science 323:133-138.

[0117] In addition to their use in sequencing, the polymerases of the invention are also useful in a variety of other genotyping analyses, e.g., SNP genotyping using single base extension methods, real time monitoring of amplification, e.g., RT-PCR methods, and the like. Further details regarding sequencing and nucleic acid amplification can be found, e.g., in Sambrook, Ausubel, and Innis, all infra.

Recombinant Polymerases with Desirable Properties for Single Molecule Sequencing

[0118] The compositions of the invention comprise a modified recombinant DNA polymerase which exhibits one or more altered properties (e.g., kinetic or other properties) desirable in single molecule sequencing applications. An exemplary property of certain polymerases of the invention is one or more slow catalytic steps during the polymerase kinetic cycle relative to a wild-type or parental polymerase. The one or more slow catalytic steps can be achieved by introducing one or more functionalities into the polymerase, e.g., enhanced metal coordination, closed conformation stabilization, enhanced or destabilized interactions with certain portions of a nucleotide or nucleotide analog (e.g., the base, a phosphate group, or a label on an analog), altered polyphosphate release, slower polymerase translocation, and/or strengthened or weakened interactions with the phosphate tail of a nucleotide analog. Other exemplary properties include exonuclease deficiency, increased closed complex stability, altered (e.g., reduced) branching fraction, altered cofactor selectivity, increased yield, increased thermostability, increased accuracy, increased speed, and increased readlength.

[0119] As will be understood, polymerases of the invention can display one of the aforementioned properties alone or can display two or more of the properties in combination. Moreover, it will be understood that while a polymerase or group of polymerases may be described with respect to a particular property, the polymerase(s) may possess additional modified properties not mentioned in every instance for ease of discussion. A single mutation (e.g., a single amino acid substitution, deletion, insertion, or the like) may give rise to the one or more altered properties, or the one or more properties may result from two or more mutations which act in concert to confer the desired activity. The recombinant polymerases, mutations, and altered properties exhibited by the recombinant polymerases are set forth in greater detail below.

[0120] A. Modified Recombinant Polymerases with Slow Steps

[0121] In one aspect, the invention features recombinant polymerases with modifications that decrease the rate of one or more steps within the catalytic cycle, for example, to achieve a reaction system having two kinetically observable reaction steps within an observable phase of the polymerase reaction. As described in greater detail below, such systems can be useful for observing the activity of a polymerase enzyme in real time, for example, for carrying out single molecule nucleic acid sequencing. For example, a system in which the reaction kinetics exhibit two slow steps within an observable phase can result in more observable sequencing events, allowing for a more accurate determination of a nucleic acid sequence.

[0122] In single molecule DNA sequencing by synthesis, for example as described in Eid et al. (2009) Science 323(5910):133-138, the incorporation of specific nucleotides can be determined by observing bright phases and dark phases which correspond, for example, to reaction steps in which a fluorescent label is associated with the polymerase enzyme and steps in which the fluorescent label is not associated with the enzyme, respectively. In some embodiments of the invention, the polymerase reaction system will exhibit two sequential slow (kinetically observable) reaction steps wherein each of the steps is in a bright phase. In some embodiments of the invention, the system will exhibit two sequential slow reaction steps wherein each of the steps is in a dark phase. In some embodiments, the system will have four slow reaction steps, two slow steps in a bright phase and two slow steps in a dark phase. In some cases, the two or more slow steps are consecutive. In some cases, there can be intervening fast steps between the two or more slow steps.

[0123] An observable phase will generally have a time period during which it is observable. The time period for a bright phase, for example, can be represented by the pulse width. The time period for a dark phase can be represented, for example, by the interpulse distance. (Pulse width and interpulse distance are illustrated, e.g., in FIG. 44.) The length of each time period will not be the same for each nucleotide addition, resulting in a distribution of the length of the time periods. In some cases, the time periods with the shortest length will not be detected, leading to errors in single molecule sequencing. By designing polymerase reaction systems in which there are two slow, or kinetically observable, steps within an observable phase, the relative number of short, unobservable, time periods can be reduced, resulting in a higher proportion of observable sequencing events and allowing for a more accurate determination of nucleotide sequence. For example, having two slow steps within a bright phase can reduce the incidence of very short pulses, while having two slow steps within a dark phase can reduce the incidence of very short interpulse distances (which occasionally cause pulse merging).

[0124] The modified recombinant polymerases with decreased reaction rates described hereinbelow are desirably employed to obtain such a system with two (or more) slow reaction steps. Optionally, the polymerase reaction conditions, including the type and levels of cofactors and/or the reaction substrates are also manipulated to achieve such a system, as described in U.S. patent application Ser. No. 12/414,191 filed Mar. 30, 2009, and entitled “Two slow-step polymerase enzyme systems and methods.”

[0125] Polymerase Mediated Synthesis

[0126] In natural polymerase mediated nucleic acid synthesis, a complex is formed between a polymerase enzyme, a template nucleic acid sequence, and a priming sequence that serves as the point of initiation of the synthetic process. During synthesis, the polymerase samples nucleotide monomers from the reaction mix to determine their complementarity to the next base in the template sequence. When the sampled base is complementary to the next base, it is incorporated into the growing nascent strand. This process continues along the length of the template sequence to effectively duplicate that template. Although described in a simplified schematic fashion, the actual biochemical process of incorporation is relatively complex.

[0127] The process can be described as a sequence of steps, wherein each step can be characterized as having a particular forward and reverse reaction rate that can be represented by a rate constant. One representation of the incorporation biochemistry is provided in FIG. 12. It is to be understood that the scheme shown in FIG. 12 does not provide a unique representation of the process. In some cases, the process can be described using fewer steps. For example, the process is sometimes represented without inclusion of the enzyme isomerization steps 106 and 110. Alternatively, the process can be represented by including additional steps such as cofactor binding. Generally, steps which can be slow, and thus limit the rate of reaction, will tend to be included. Various schemes can be used to represent a polymerization reaction, e.g., having one or two slow steps, that may have more or fewer identified steps.

[0128] As shown in FIG. 12, the synthesis process begins with the binding of the primed nucleic acid template (D) to the polymerase (P) at step 102. Nucleotide (N) binding with the complex occurs at step 104. Step 106 represents the isomerization of the polymerase from the open to closed configuration. Step 108 is the chemistry step where the nucleotide is incorporated into the growing strand of the nucleic acid being synthesized. At step 110, polymerase isomerization occurs from the closed to the open position. The polyphosphate component that is cleaved upon incorporation is released from the complex at step 112. The polymerase then translocates on the template at step 114. As shown, the various steps can include reversible paths and may be characterized by the reaction constants shown in FIG. 12 where:

kₒₙ/k_{off}=DNA binding/release;
k₁/k₋₁=nucleotide binding/release;
k₂/k₋₂=polymerase isomerization (open/closed);
k₃/k₋₃=nucleotide incorporation (chemistry);
k₄/k₋₄=polymerase isomerization (closed/open);
k₅/k₋₅=polyphosphate release/binding;
k₆/k₋₆=polymerase translocation.

[0129] Thus, during steps 104 through 110, the nucleotide is retained within the overall complex, and during steps 104 and 106, reversal of the reaction step will yield an unproductive event, i.e., not resulting in incorporation. For example, a bound nucleotide at step 104 may be released regardless of whether it is the correct nucleotide for incorporation.

[0130] By selecting the appropriate polymerase enzyme, polymerase reaction conditions, and polymerase substrates, the absolute and relative rates of the various steps can be controlled. Controlling the reaction such that the reaction exhibits two or more sequential kinetically observable, or slow, steps can produce a nucleic acid polymerization reaction in which the incorporation of the nucleotides can be observed more accurately. These characteristics are particularly useful for sequencing applications, and in particular single molecule DNA sequencing.

[0131] In some cases, the invention involves a process having two or more slow steps that comprise steps after nucleotide binding through the step of product release. For the mechanism shown in FIG. 12, this would be, for example, any of steps 106, 108, 110, and 112. In some cases, steps 108 (nucleotide incorporation) and 112 (product release) are the two slow steps. In some cases, the invention involves a process having two or more slow steps that comprise the steps after product release through nucleotide binding. For the mechanism shown in FIG. 12, this would include steps 114 and 104.

[0132] In some cases, the invention involves a process in which there are two or more slow steps in two different observable phases within the polymerization, for example, two slow steps in a bright phase and two slow steps in a dark phase. For example, this could include a system having two slow steps in the steps after nucleotide binding through product release, and two slow steps for the steps after product release through nucleotide binding. As is described herein, producing a process in which there are two slow steps in these portions of the polymerase reaction can result in a higher proportion of detectable enzyme states which can be useful, for example, to observe the sequential incorporation of nucleotides for nucleotide sequencing.

[0133] By the term slow step is generally meant a kinetically observable step. An enzymatic process, such as nucleic acid polymerization, can have both slower, kinetically observable steps and faster steps which are so fast that they have no measurable effect on the kinetics, or rate, of the reaction. In some reactions, there can be a single rate limiting step. For such reactions, the kinetics can be characterized by the rate of that single step. Other reactions will not have a single rate limiting step, but will have two or more steps which are close enough in rate such that the characteristics of each will contribute to the kinetics of the reaction. For the current invention, the slow, or kinetically observable, steps need not be the slowest step or the rate limiting step of the reaction. For example, a process of the current invention can involve a reaction in which step 104, nucleotide addition, is the slowest (rate limiting) step, while two or more of steps 106, 108, 110, or 112 are each kinetically observable.

[0134] As used herein, the term rate as applied to the steps of a reaction can refer to the average rate of reaction. For example, when observing a single molecule reaction, there will generally be variations in the rates as each individual nucleotide is added to a growing nucleic acid. In such cases the rate of the reaction can be represented by observing a number of individual events, and combining the rates, for example, by obtaining an average of the rates.

[0135] As used herein, the reference to the rate of a step or rate constant for a step can refer to the forward reaction rate of the polymerase reaction. As is generally understood in the art, reaction steps can be characterized as having forward and reverse rate constants. For example, for step 108, k₃ represents the forward rate constant, and k₋₃ represents the reverse rate constant for the nucleotide incorporation. Some reaction steps, such as step 108, constitute steps which would be expected to be first order steps. Other steps, such as the forward reaction of step 104, with rate constant k₂, would be expected to be second order rate constants. For the purposes of the invention, for comparing the rate or the rate constant of a first order to a second order step, the second order rate constant k₂ can be treated as a pseudo-first order rate constant with the value [N]*k₂ where the concentration of nucleotide [N] is known.

[0136] For some applications, it is desirable that the kinetically observable steps of the invention have rate constants that are lower than about 100 per second. In some cases, the rate constants are lower than about 60 per second, lower than about 50 per second, lower than about 30 per second, lower than about 20 per second, lower than about 10 per second, lower than about 5 per second, lower than about 2 per second, or lower than about 1 per second.

[0137] In some embodiments the slowest of the two or more kinetically observable steps has a rate constant when measured under single molecule conditions of between about 60 to about 0.5 per second, about 30 per second to about 2 per second, or about 10 to about 3 per second.

[0138] The ratio of the rate constants of each the two or more slow steps is generally greater than 1:10; in some cases the ratio of the rate constants is about 1:5, in some cases the ratio of the rate constants is about 1:2, and in some cases, the ratio of rate constants is about 1:1. The ratio of the rate constants can be between about 1:10 and about 1:1, between about 1:5 and about 1:1, or between about 1:2 and about 1:1.

[0139] In some cases it is useful to consider the two slow-step system in terms of rates rather than rate constants. It is generally desirable that the kinetically observable steps of the invention have rates that are lower than about 100 molecules per second when the reactions are carried out under single-molecule conditions. In some cases, the rates are lower than about 60 molecules per second, lower than about 50 molecules per second, lower than about 30 molecules per second, lower than about 20 molecules per second, lower than about 10 molecules per second, lower than about 5 molecules per second, lower than about 2 molecules per second, or lower than about 1 molecule per second.

[0140] In some embodiments the slowest of the two or more kinetically observable steps has a rate when measured under single molecule conditions of between about 60 to about 0.5 molecules per second, about 30 molecules per second to about 2 molecules per second, or about 10 to about 3 molecules per second.

[0141] The ratio of the rates of each the two or more slow steps is generally greater than 1:10. In some cases the ratio of the rates is about 1:5, in some cases the ratio of the rates is about 1:2, and in some cases, the ratio of rates is about 1:1. The ratio can be between about 1:10 and about 1:1, between about 1:5 and about 1:1, or between about 1:2 and about 1:1.

[0142] Any one (or more) of the steps described above is optionally slowed in the recombinant polymerases of the invention, e.g., to produce a polymerase useful in achieving a reaction system exhibiting two slow steps.

[0143] Sequencing by Incorporation

[0144] For sequencing processes that rely upon monitoring of the incorporation of nucleotides into growing nascent strands being synthesized by the complex, the progress of the reaction through these steps is of significant importance. In particular, for certain “real time” nucleotide incorporation monitoring processes, the detectability of the incorporation event is improved based upon the amount of time the nucleotide is incorporated into and retained within the synthesis complex during its ultimate incorporation into a primer extension product.

[0145] By way of example, in certain exemplary processes, the presence of the nucleotide in the synthesis complex is detected either by virtue of a focused observation of the synthesis complex, or through the use of interactive labeling techniques that produce characteristic signals when the nucleotide is within the synthesis complex. See, e.g., Levene et al. (2003) Science 299:682-686 and Eid et al. (2009) Science 323(5910):133-138, the full disclosures of which are incorporated herein by reference in their entirety for all purposes.

[0146] In a first exemplary technique, as schematically illustrated in FIG. 13 Panel A, a nucleic acid synthesis complex, including a polymerase enzyme 202, a template sequence 204 and a complementary primer sequence 206, is provided immobilized within an observation region 200 that permits illumination (as shown by hv) and observation of a small volume that includes the complex without excessive illumination of the surrounding volume (as illustrated by dashed line 208). By illuminating and observing only the volume immediately surrounding the complex, one can readily identify fluorescently labeled nucleotides that become incorporated during that synthesis, as such nucleotides are retained within that observation volume by the polymerase for longer periods than those nucleotides that are simply randomly diffusing into and out of that volume.

[0147] In particular, as shown in Panel B of FIG. 13, when a nucleotide, e.g., A, is incorporated into by the polymerase, it is retained within the observation volume for a prolonged period of time, and upon continued illumination yields a prolonged fluorescent signal (shown by peak 210). By comparison, randomly diffusing and not incorporated nucleotides remain within the observation volume for much shorter periods of time, and thus produce only transient signals (such as peak 212), many of which go undetected, due to their extremely short duration.

[0148] In particularly preferred exemplary systems, the confined illumination volume is provided through the use of arrays of optically confined apertures termed zero mode waveguides (ZMWs), e.g., as shown by confined reaction region 200 (see, e.g., U.S. Pat. No. 6,917,726, which is incorporated herein by reference in its entirety for all purposes). For sequencing applications, the DNA polymerase is typically provided immobilized upon the bottom of the ZMW. See, e.g., Korlach et al. (2008) PNAS U.S.A. 105(4):1176-1181, which is incorporated herein by reference in its entirety for all purposes.

[0149] In operation, the fluorescently labeled nucleotides (shown as A, C, G and T) bear one or more fluorescent dye groups on a terminal phosphate moiety that is cleaved from the nucleotide upon incorporation. As a result, synthesized nucleic acids do not bear the build-up of fluorescent labels, as the labeled polyphosphate groups diffuse away from the complex following incorporation of the associated nucleotide, nor do such labels interfere with the incorporation event. See, e.g., Korlach et al. (2008) Nucleosides, Nucleotides and Nucleic Acids 27:1072-1083.

[0150] In a second exemplary technique, the immobilized complex and the nucleotides to be incorporated are each provided with interactive labeling components. Upon incorporation, the nucleotide borne labeling component is brought into sufficient proximity to the complex borne (or complex proximal) labeling component, such that these components produce a characteristic signal event. For example, the polymerase may be provided with a fluorophore that provides fluorescent resonant energy transfer (FRET) to appropriate acceptor fluorophores. These acceptor fluorophores are provided upon the nucleotide to be incorporated, where each type of nucleotide bears a different acceptor fluorophore, e.g., that provides a different fluorescent signal. Upon incorporation, the donor and acceptor are brought close enough together to generate energy transfer signal. By providing different acceptor labels on the different types of nucleotides, one obtains a characteristic FRET-based fluorescent signal for the incorporation of each type of nucleotide, as the incorporation is occurring.

[0151] In a related aspect, a nucleotide analog may include two interacting fluorophores that operate as a donor/quencher pair, where one member is present on the nucleobase or other retained portion of the nucleotide, while the other member is present on a phosphate group or other portion of the nucleotide that is released upon incorporation, e.g., a terminal phosphate group. Prior to incorporation, the donor and quencher are sufficiently proximal on the same analog as to provide characteristic signal quenching. Upon incorporation and cleavage of the terminal phosphate groups, e.g., bearing a donor fluorophore, the quenching is removed and the resulting characteristic fluorescent signal of the donor is observable.

[0152] In exploiting the foregoing processes, where the incorporation reaction occurs too rapidly, it may result in the incorporation event not being detected, i.e., the event speed exceeds the detection speed of the monitoring system. The missed detection of incorporated nucleotides can lead to an increased rate of errors in sequence determination, as omissions in the real sequence. In order to mitigate the potential for missed pulses due to short reaction times, in one aspect, the current invention can result in increased reaction time for incorporations. An advantage of employing polymerases with reduced reaction rates, e.g., polymerases exhibiting decreased rates and/or two slow-step kinetics, is an increased frequency of longer, detectable, binding events. This advantage may also be seen as an increased ratio of longer, detectable pulses to shorter, non-detectable pulses, where the pulses represent binding events.

[0153] Single molecule sequencing often involves the optical observation of the polymerase process during the process of nucleotide incorporation, for example, observation of the enzyme-DNA complex. During this process, there are generally two or more observable phases. For example, where a terminal-phosphate labeled nucleotide is used and the enzyme-DNA complex is observed, there is a bright phase during the steps where the label is incorporated with (bound to) the polymerase enzyme, and a dark phase where the label is not incorporated with the enzyme. For the purposes of this invention, both the dark phase and the bright phase are generally referred to as observable phases, because the characteristics of these phases can be observed.

[0154] Whether a phase of the polymerase reaction is bright or dark can depend, for example, upon how and where the components of the reaction are labeled and also upon how the reaction is observed. For example, as described above, the phase of the polymerase reaction where the nucleotide is bound can be bright where the nucleotide is labeled on its terminal phosphate. However, where there is a quenching dye associated with the enzyme or template, the bound state may be quenched, and therefore be a dark phase. Analogously, in a ZMW, the release of the terminal phosphate may result in a dark phase, whereas in other systems, the release of the terminal phosphate may be observable, and therefore constitute a bright phase.

[0155] For example, consider again the reaction scheme of FIG. 12 in the context of the sequencing by incorporation embodiment described above which utilizes nucleotides having labels on their terminal phosphates. For this system, intermediates PDN, P*DN, P*D₊₁PPᵢ and PD₊₁PPᵢ would all represent bright states of a bright phase because for each of these intermediates, the label is associated with the polymerase enzyme. In contrast, intermediates PD₊₁ and PD correspond to dark states of a dark phase, because for these intermediates, no dye is associated with the polymerase enzyme. In one aspect of the invention, any step (and preferably any two of the steps) which proceed from a bright intermediate, e.g. steps 106, 108, 110, and 112 of FIG. 12 are slow. By having two or more sequential bright steps that are slow, the relative number of longer pulses and detectable incorporation events increases.

[0156] Another example of a polymerase reaction with distinct observable phases is one in which the nucleotide is labeled such that its label does not dissociate from the enzyme upon product release, for example where the nucleotide is labeled on the base or on the sugar moiety. Here, the phase in which the label is associated with the active site of the enzyme (bright or dark) may extend past product release until translocation. For this example, an observable phase may extend from nucleotide binding until translocation.

[0157] In addition, the systems of the present invention may have two or more different distinct bright phases, for example, phases that can be distinguished based on different colors, e.g. different fluorescent emission wavelengths in the different observable phases. For all of these cases, it can be advantageous to have more than one rate limiting (kinetically observable) step within a phase. Having more than one rate limiting step within a phase can result in a distribution of pulse widths having relatively fewer undetectable or poorly detectable short pulses.

[0158] While not being bound by theory, the following theoretical basis is provided for obtaining improved single molecule sequencing results by using a system having two or more slow steps. A model for the effect of two slow steps on the probability density for residence time is described herein. FIG. 14 shows a plot of calculated probability density for residence time for cases in which (1) one step is rate limiting and (2) two equivalent rate limiting (slow) steps are present for the observable phase in which the nucleotide is associated with the enzyme.

[0159] For the case in which one step is rate limiting, the probability distribution for the binding time can be represented by the single exponential equation:

y=A₀e^{-kt} Eq. 1

[0160] This represents the case in which, for example, incorporation of nucleotide into the growing nucleic acid (step 108 in FIG. 12) is the single slow step.

[0161] FIG. 14 illustrates that where one slow step is present in this phase, there is an exponentially decreasing probability of a given residence time as the residence time increases, providing a distribution in which there is a relatively high probability that the residence time will be short.

[0162] For the case in which there are two slow steps in this phase, for example where both the incorporation step (step 108 in FIG. 12) and the release of product (PPi) step (step 112 in FIG. 12) are slow, the probability density versus residence time can be represented by a double exponential equation:

y=A₀e^{-k}_{₁}^{t}−B₀e^{-k}_{₂}^{t} Eq. 2

[0163] FIG. 14 illustrates that for the case in where there are two slow steps, the probability of very fast residence times is relatively low as compared to the case having one slow step. In addition, the probability distribution for two slow steps exhibits a peak in the plot of probability density versus residence time. This type of residence time distribution can be advantageous for single molecule sequencing where it is desired to measure a high proportion of binding events and where fast binding events may be unreliably detected.

[0164] Typically, for a given illumination/detection system there will be a minimum detection time below which events, such as binding events, will be unreliably detected or not detected at all. This minimum detection time can be attributed, for example, to the frame acquisition time or frame rate of the optical detector, for example, a CCD camera. A discussion of detection times and approaches to detection for these types of systems is provided in U.S. patent application Ser. No. 12/351,173 the full disclosure of which is incorporated herein by reference in its entirety for all purposes. FIG. 14 includes a line which indicates a point where the residence time equals a minimum detection time (Tmin). The area under the curve in the region below Tmin represents the population of short pulses which will not be accurately detected for this system. It can be seen from FIG. 14 that the relative proportion of binding times that fall below Tmin is significantly lower for the case in which the reaction exhibits two sequential slow steps as compared to the case where the reaction exhibits one slow step.

[0165] Thus, as described above, one aspect of the invention relates to methods, systems, and compositions for performing nucleic acid sequencing with a nucleic acid synthesis reaction in which the reaction exhibits two or more slow steps within a bright phase, e.g., employing a modified polymerase exhibiting one or more slowed step. In addition, an aspect of the invention relates to nucleic acid synthesis reactions having two or more slow states wherein each of the slow steps proceeds from a state in which the labeled component is associated with the polymerase enzyme.

[0166] In some embodiments of the invention, the two or more slow steps are within a dark phase. In some cases the two or more slow steps proceed from states in which the labeled component is not associated with the enzyme. Having two or more slow states that proceed from a dark intermediate can be advantageous, for example, for lowering the frequency of events having a very short dark state or having a very short interpulse distance. The advantage of this type of system can be demonstrated by again considering FIG. 12 in the context of the sequencing by incorporation embodiment described above which utilizes nucleotides having labels on their terminal phosphates. In this system, intermediates PD₊₁ and PD can correspond to dark states within a dark phase, for example in a ZMW, because for these intermediates, no dye is associated with the polymerase enzyme.

[0167] The steps that comprise the two slow steps can include, for example, nucleotide addition, enzymatic isomerization such as to or from a closed state, cofactor binding or release, product release, incorporation of nucleic acid into the growing nucleic acid, or translocation. As noted, one or more of the slow steps can be achieved by modification of the polymerase. Various exemplary modified recombinant polymerases exhibiting one or more slow steps are described herein, along with strategies for producing additional such polymerases.

### Modified Recombinant Polymerases Exhibiting Slow Steps

[0168] The invention features recombinant polymerases with modifications that slow one or more steps in the catalytic cycle, for example, to achieve two limiting steps as described above. Accordingly, one aspect of the invention provides a modified recombinant DNA polymerase that comprises one or more mutations relative to a parental polymerase and that exhibits a first rate constant for a first step in its catalytic cycle that is less than a first rate constant for the first step exhibited by the parental polymerase. For example, the first rate constant exhibited by the modified recombinant polymerase can be less than 0.5 times, less than 0.25 times, or even less than 0.1 times the first rate constant exhibited by the parental polymerase.

[0169] As noted above, to achieve a two slow step enzyme it is typically desirable to decrease the rate of a step which is not already rate limiting. Thus, in one aspect, the first step is not rate limiting in the catalytic cycle of the parental polymerase. Also as noted above, polymerases exhibiting approximately the same rate for two sequential (though not necessarily consecutive) steps are desirable. Thus, the modified recombinant polymerase optionally exhibits a second rate constant for a second step in its catalytic cycle, where the second rate constant is between 0.1 and 10 times the first rate constant. Preferably, the second rate constant exhibited by the modified recombinant polymerase is between 0.2 and 5 times the first rate constant exhibited by the modified recombinant polymerase. More preferably, the second rate constant exhibited by the modified recombinant polymerase is approximately equal to the first rate constant exhibited by the modified recombinant polymerase (e.g., within 10%, 5%, or 1%). In one exemplary embodiment, the second step involves incorporation of a bound nucleotide or nucleotide analog, the first step involves release of a polyphosphate product, and the second rate constant exhibited by the modified recombinant polymerase is between 0.2 and 1 times the first rate constant exhibited by the modified recombinant polymerase. In another exemplary embodiment, the first step involves translocation and the second step involves nucleotide or analog binding. It will be understood that in this context, the terms first step and second step are merely used for convenience in referring to two different steps and do not imply any particular order of occurrence (that is, the first step can precede or follow the second and need not be the initial event in the catalytic pathway).

[0170] Optionally, the second step is rate limiting in the catalytic cycle of the parental polymerase. The first or second step can be rate limiting in the catalytic cycle of the modified polymerase. As another option, however, the first and/or second steps are not rate limiting for the catalytic cycle, but are limiting for a portion of the cycle (e.g., the bright or dark portion). Optionally, the polymerase exhibits two limiting steps in the bright portion of the cycle and two in the dark portion.

[0171] Since for many polymerases nucleotide incorporation is rate limiting, the second step can, for example, involve incorporation of a bound nucleotide or nucleotide analog, e.g., an analog having from 3-7 phosphate groups, e.g., with a terminal label. The second rate constant would then be k₃ according to the catalytic cycle illustrated in FIG. 12.

[0172] Essentially any step in the cycle can correspond to the first step whose rate is slowed, for example, nucleotide or analog binding, translocation, isomerization, e.g., of the polymerase or analog, chemistry (incorporation or transphosphorylation), pre-product release isomerization, and product release. Optionally, an extra kinetic step is created that does not occur in the parental enzyme's cycle. In one exemplary class of useful embodiments, the first step involves release of a polyphosphate product, including, for example (and depending on the type of nucleotide or analog incorporated), a pyrophosphate, a polyphosphate with three or more phosphate groups, a labeled polyphosphate, etc. Polyphosphate release is typically so fast as to be undetectable by routine techniques, but in the polymerases of the invention release can be sufficiently slowed as to be observable and permit determination of a rate constant (e.g., k₅). Accordingly, the first rate constant exhibited by a modified recombinant polymerase for release of polyphosphate can be less than 100/second, less than 75/second, or even less than 50/second.

[0173] The parental and modified polymerases can display comparable rates for the second step, or the second step can also be slowed for the recombinant polymerase. Thus, the second rate constant exhibited by the modified recombinant polymerase is optionally smaller than the second rate constant exhibited by the parental polymerase for the second step, e.g., less than 0.5 times, less than 0.25 times, or even less than 0.1 times the second rate constant exhibited by the parental polymerase.

[0174] A modified polymerase (e.g., a modified recombinant Φ29-type DNA polymerase) that exhibits one or more slow steps optionally includes a mutation (e.g., an amino acid substitution or insertion) at one or more of positions 484, 249, 179, 198, 211, 255, 259, 360, 363, 365, 370, 372, 378, 381, 383, 387, 389, 393, 433, 478, 480, 514, 251, 371, 379, 380, 383, 458, 486, 101, 188, 189, 303, 313, 395, 414, 497, 500, 531, 532, 534, 558, 570, 572, 574, 64, 305, 392, 402, 422, 496, 529, 538, 555, 575, 254, 390, 372-397, 507-514, 93, 129, 170, 176, 180, 181, 182, 185, 190, 203, 204, 247, 329, 330, 361, 399, 420, 427, 436, 459, 477, 487, and 567, or any other position where a mutation is noted herein, where numbering of positions is relative to wild-type Φ29 polymerase. For example, relative to wild-type Φ29 a modified recombinant polymerase can include at least one amino acid substitution or combination of substitutions selected from the group consisting of: an amino acid substitution at position 484; an amino acid substitution at position 198; an amino acid substitution at position 381; an amino acid substitution at position 387 and an amino acid substitution at position 484; an amino acid substitution at position 372, an amino acid substitution at position 480, and an amino acid substitution at position 484; an amino acid substitution at position 372, an amino acid substitution at position 387, and an amino acid substitution at position 480; an amino acid substitution at position 372, an amino acid substitution at position 387, and an amino acid substitution at position 484; an amino acid substitution at position 372, an amino acid substitution at position 387, an amino acid substitution at position 478, and an amino acid substitution at position 484; A484E; A484Y; N387L; T372Q; T372Y; T372Y and K478Y; K478Y; I370W; F198W; L381A; T368F; A484E, E375Y, K512Y, and T368F; A484Y, E375Y, K512Y, and T368F; N387L, E375Y, K512Y, and T368F; T372Q, E375Y, K512Y, and T368F; T372L, E375Y, K512Y, and T368F; T372Y, K478Y, E375Y, K512Y, and T368F; I370W, E375Y, K512Y, and T368F; F198W, E375Y, K512Y, and T368F; L381A, E375Y, K512Y, and T368F; and E375Y, K512Y, and T368F. A K512F substitution (or K512W, K512L, K512I, K512V, K512H, etc.) is optionally employed, e.g., where a K512Y substitution is listed herein. As another example, the modified polymerase can include an insertion of at least one amino acid (e.g., 1-7 amino acids, e.g., glycine) within residues 372-397 and/or 507-514. For example, a glycine residue can be introduced after residue 374, 375, 511, and/or 512 (designated as 374.1G, 375.1G, etc.).

[0175] A list of exemplary mutations and combinations thereof is provided in Table 1, and additional exemplary mutations are described herein, e.g., in Tables 2-5, 13, and 16 and FIGS. 34-35. Essentially any of these mutations, or any combination thereof, can be introduced into a polymerase to produce a modified recombinant polymerase (e.g., into wild-type(Φ29, a wild-type or exonuclease deficient Φ29-type polymerase, and/or an E375Y/K512Y/T368F, E375Y/K512Y/T368F/A484E, E375Y/K512Y/A484E, E375Y/K512Y/T368G/A484E, E375Y/K512Y/L253A, or E375Y/K512Y/L253A/A484E Φ29 or Φ29-type polymerase, as just a few examples).

TABLE 1

| Mutation | Rationale |
|---|---|
| D249E | metal coordination |
| A484E | metal coordination |
| D249E/A484E | metal coordination |
| A484D | metal coordination |
| A484H | metal coordination |
| A484Y | metal coordination |
| D249E/A484D | metal coordination |
| D249E/A484H | metal coordination |
| D249E/A484Y | metal coordination |
| 374.1G/375.1A | dye interaction |
| 374.1Gins/375.1Gins | dye interaction |
| V514Y | dye interaction |
| V514F | dye interaction |
| 511.1G/K512Y/512.1G | dye interaction |
| T372H | closed conformation of fingers |
| T372V | closed conformation of fingers |
| T372I | closed conformation of fingers |
| T372F | closed conformation of fingers |
| T372Y | closed conformation of fingers |
| T372N | closed conformation of fingers |
| T372Q | closed conformation of fingers |
| T372L | closed conformation of fingers |
| T372L/K478Y | closed conformation of fingers |
| T372Y/K478Y | closed conformation of fingers |
| T372Y/K478L | closed conformation of fingers |
| K478Y | closed conformation of fingers |
| D365N | closed conformation of fingers |
| D365Q | closed conformation of fingers |
| L480H | closed conformation of fingers |
| L480F | closed conformation of fingers |
| L381A | closed conformation of finger and exo |
| I179A | closed conformation of finger and exo |
| I378A | closed conformation of finger and exo |
| I179A/L381A | closed conformation of finger and exo |
| I179A/I378A/L381A | closed conformation of finger and exo |
| I370A/I378A | closed conformation of finger and exo |
| I179A/I370A/I378A/ | closed conformation of finger and exo |
| L381A | |
| I179W | closed conformation of finger and exo |
| I179H | closed conformation of finger and exo |
| F211A | closed conformation of finger and exo |
| F211W | closed conformation of finger and exo |
| F211H | closed conformation of finger and exo |
| F198A | closed conformation of finger and exo |
| F198W | closed conformation of finger and exo |
| F198H | closed conformation of finger and exo |
| P255A | closed conformation of finger and exo |
| P255W | closed conformation of finger and exo |
| P255H | closed conformation of finger and exo |
| Y259A | closed conformation of finger and exo |
| Y259W | closed conformation of finger and exo |
| Y259H | closed conformation of finger and exo |
| F360A | closed conformation of finger and exo |
| F360W | closed conformation of finger and exo |
| F360H | closed conformation of finger and exo |
| F363A | closed conformation of finger and exo |
| F363H | closed conformation of finger and exo |
| F363W | closed conformation of finger and exo |
| I370W | closed conformation of finger and exo |
| I370H | closed conformation of finger and exo |
| K371A | closed conformation of finger and exo |
| K371W | closed conformation of finger and exo |
| I378H | closed conformation of finger and exo |
| I378W | closed conformation of finger and exo |
| L381W | closed conformation of finger and exo |
| L381H | closed conformation of finger and exo |
| K383N | closed conformation of finger and exo |
| K383A | closed conformation of finger and exo |
| L389A | closed conformation of finger and exo |
| L389W | closed conformation of finger and exo |
| L389H | closed conformation of finger and exo |
| F393A | closed conformation of finger and exo |
| F393W | closed conformation of finger and exo |
| F393H | closed conformation of finger and exo |
| I433A | closed conformation of finger and exo |
| I433W | closed conformation of finger and exo |
| I433H | closed conformation of finger and exo |
| K383L | phosphate backbone interaction |
| K383H | phosphate backbone interaction |
| K383R | phosphate backbone interaction |
| Q380R | phosphate backbone interaction |
| Q380H | phosphate backbone interaction |
| Q380K | phosphate backbone interaction |
| K371L | phosphate backbone interaction |
| K371H | phosphate backbone interaction |
| K371R | phosphate backbone interaction |
| K379L | phosphate backbone interaction |
| K379H | phosphate backbone interaction |
| K379R | phosphate backbone interaction |
| E486A | phosphate backbone interaction |
| E486D | phosphate backbone interaction |
| N387L | incoming nucleotide base |
| | and translocation |
| N387F | incoming nucleotide base |
| | and translocation |
| N387V | incoming nucleotide base |
| | and translocation |
| N251H | phosphate interaction |
| N251Q | phosphate interaction |
| N251D | phosphate interaction |
| N251E | phosphate interaction |
| N251K | phosphate interaction |
| N251R | phosphate interaction |
| A484K | phosphate interaction |
| A484R | phosphate interaction |
| K383Q | phosphate interaction |
| K383N | phosphate interaction |
| K383T | phosphate interaction |
| K383S | phosphate interaction |
| K383A | phosphate interaction |
| I179H/I378H | closed conformation |
| I179W/I378W | closed conformation |
| I179Y/I378Y | closed conformation |
| K478L | |
| I378Y | |
| I370A | |
| I179Y | |
| N387L/A484E | |
| N387L/A484Y | |
| T372Q/N387L/A484E | |
| T372Q/N387L/A484Y | |
| T372L/N387L/A484E | |
| T372L/N387L/K478Y/A484Y | |
| T372Y/N387L/K478Y/A484E | |
| T372Y/N387L/K478Y/A484Y | |

[0176] Table 2 presents exemplary Φ29 mutants that exhibit two slow step behavior under appropriate reaction conditions. The first three modified polymerases exhibit the most pronounced two slow step behavior, followed by the next six. As noted, the polymerases are optionally exonuclease-deficient; for example, they can also include an N62D substitution.

TABLE 2

A484E/E375Y/K512Y/T368F
A484Y/E375Y/K512Y/T368F
N387L/E375Y/K512Y/T368F
T372Q/E375Y/K512Y/T368F
T372L/E375Y/K512Y/T368F
T372Y/K478Y/E375Y/K512Y/T368F
I370W/E375Y/K512Y/T368F
F198W/E375Y/K512Y/T368F
L381A/E375Y/K512Y/T368F
E375Y/K512Y/T368F

[0177] Additional exemplary recombinant polymerases, including polymerases that exhibit two slow step behavior under appropriate reaction conditions, are presented herein, e.g., in Table 3, Table 13, and FIG. 34. Additional exemplary mutations of interest, e.g., for slowing a reaction rate or achieving two slow step behavior, are included in Table 4, Table 13, and FIG. 34. As noted for other exemplary mutations herein, essentially any of the mutations listed in Tables 3, 4, 13 and 14, or any combination thereof, can be introduced into a polymerase to produce a modified recombinant polymerase; for example, into wild-type Φ29, a wild-type or exonuclease deficient Φ29-type polymerase (e.g., including an N62D substitution), and/or E375Y/K512Y/T368F, E375Y/K512Y/T368F/A484E, E375Y/K512Y/A484E, or E375Y/K512Y/T368G/A484E Φ29, as just a few examples. Also, as for the other exemplary mutations herein, a polymerase comprising one or more of the mutations listed in Tables 3, 4, 13, and 14 optionally also includes one or more tags, for example, a biotin attachment site or polyhistidine tag. As just one example, the polymerase optionally includes an N-terminal biotin attachment site followed by a His10 polyhistidine tag and/or a C-terminal His10 tag. Exemplary exogenous or heterologous features that can be added to recombinant polymerases are provided in Table 10.

TABLE 3
Exemplary Φ29 polymerases. Entries marked with an asterisk (*)
have been demonstrated to display two slow step behavior in transient
kinetic assays, e.g., as described hereinbelow in Example 2. The
remaining exemplary polymerases are also thought to have two slow
step properties, based on their behavior in a Cbz assay (e.g., as
described hereinbelow in Example 4) where greater inhibition of the
polymerases by Cbz indicates stronger binding of product and therefore
slower product release.

T368F_E375Y_K512Y_K529N
T368F_E375Y_K512Y_T573A
T368F_T372Q_E375Y_K512Y*
T368F_T372L_E375Y_K512Y*
T368F_T372Y_E375Y_K478Y_K512Y*
T368F_E375Y_A484Y_K512Y*
T368F_E375Y_N387L_K512Y
T368F_E375Y_L389W_K512Y
T368F_E375Y_Q380K_K512Y
T368F_E375Y_Q380R_K512Y
T368F_E375Y_Q380D_K512Y
T368F_E375Y_N387F_K512Y
T368F_E375Y_N387W_K512Y
T189K_T368F_E375Y_K512Y
T368F_E375Y_K512Y_F572K
T368F_E375Y_A484E_S487E_K512Y
T368F_T372Q_E375Y_A484E_K512Y*
T368F_T372L_E375Y_A484E_K512Y*
T368F_T372Y_E375Y_K478Y_A484E_K512Y*
T368F_T372L_E375Y_K478Y_A484Y_K512Y*
T368F_T372L_E375Y_N387L_K478Y_A484Y_K512Y*
T368F_T372Y_E375Y_N387L_K478Y_A484Y_K512Y*
T368F_E375Y_A484E_K512Y*

TABLE 4
Exemplary mutations and combinations.

| Mutation | Rationale |
|---|---|
| T372L | |
| N251K | |
| S215D_T368F_E375Y_K512Y | |
| T368F_T372L_E375Y_K478Y_K512Y | |
| D249E_T368F_E375Y_A484E_K512Y | |
| T368F_E375Y_K512Y | |
| T368F_E375Y_Q380K_K512Y | |
| T368F_E375Y_I378W_K512Y | |
| T368F_E375Y_A484Q_K512Y | |
| T368F_E375Y_A484E_K512Y | |
| T368F_E375Y_K379R_A484E_K512Y | |
| T368F_E375Y_A484K_K512Y | |
| T368F_E375Y_A484R_K512Y | |
| T368F_E375Y_S395K_K512Y | |
| T368F_E375Y_S459D_A484E_K512Y | |
| T368F_E375Y_S459E_A484E_K512Y | |
| T368F_E375Y_A484E_S487D_K512Y | |
| T368F_E375Y_P477D_K512Y | |
| N251Q_T368F_E375Y_K512Y | |
| T368F_T372Q_E375Y_A484Y_K512Y | |
| T368F_T372L_E375Y_A484Y_K512Y | |
| T368F_E375Y_A484K_K512Y | |
| T368F_E375Y_A484R_K512Y | |
| T368F_E375Y_N387L_A484E_K512Y | |
| T368F_T372Q_E375Y_N387L_A484E_K512Y | |
| T368F_T372Q_E375Y_N387L_A484Y_K512Y | |
| T368F_T372L_E375Y_N387L_A484E_K512Y | |
| T368F_T372Y_E375Y_N387L_K478Y_A484E_K512Y | |
| I93F_T368F_E375Y_A484E_K512Y | |
| I93Y_T368F_E375Y_A484E_K512Y | |
| T368F_E375Y_S395K_A484E_K512Y | |
| T368F_E375Y_V399F_A484E_K512Y | |
| T368F_E375Y_V399Y_A484E_K512Y | |
| I364D_T368F_E375Y_N387L_A484E_K512Y | |
| T368F_E375Y_N387L_A484E_K512Y | |
| N251K_T368F_E375Y_K512Y | |
| N251Q_T368F_E375Y_K512Y | |
| T368F_E375Y_P477K_K512Y | |
| T368F_E375Y_P477D_K512Y | |
| T368F_T372Q_E375Y_A484Y_K512Y | |
| T368F_T372L_E375Y_A484E_K512Y | |
| T368F_T372L_E375Y_A484Y_K512Y | |
| T368F_T372Y_E375Y_K478Y_A484E_K512Y | |
| T368F_T372L_E375Y_K478Y_A484Y_K512Y | |
| T368F_E375Y_A484K_E486K_K512Y | |
| T368F_E375Y_A484R_E486R_K512Y | |
| T368F_E375Y_A484R_E486R_K512Y_E515R | |
| T368F_E375Y_A484K_E486K_K512Y_E515K | |
| E375Y_A484E_K512Y | |
| E375Y_I378K_A484E_K512Y | |
| T368G_E375Y_A484E_K512Y | |
| T15I_T368F_E375Y_N387L_A484E_K512Y | |
| T15I_T368F_E375Y_A484E_K512Y | |
| N313K_T368F_E375Y_A484E_Q497K_K512Y | |
| P300E_Y315L_T368F_E375Y_A484E_K512Y | |
| P300G_Y315V_T368F_E375Y_A484E_K512Y | |
| N62H_T368F_E375Y_N387L_A484E_K512Y | |
| N62H_T368F_E375Y_A484E_K512Y | |
| T368F_E375Y_A484E_K512Y | |
| T368F_E375Y_S395K_Q497K_K512Y | |
| M188K_T368F_E375Y_S395K_Q497K_K512Y_T534K | |
| T368F_E375Y_S395K_Q497K_K512Y | |
| M188K_T368F_E375Y_S395K_Q497K_K512Y_T534K | |
| T368F_E375Y_Q380K_Q497K_K512Y | |
| T368F_E375Y_P477D_Q497K_K512Y | |
| T368F_E375Y_Q380K_Q497K_K512Y | |
| T368F_E375Y_P477D_Q497K_K512Y | |
| T368F_E375Y_Q380K_A484E_Q497K_K512Y | |
| T368F_E375Y_P477D_A484E_Q497K_K512Y | |
| T368F_E375Y_A484E_Q497K_K512Y | |
| M188K_T368F_E375Y_A484E_Q497K_K512Y | |
| T368F_E375Y_S395K_A484E_Q497K_K512Y | |
| T368F_E375Y_A484E_Q497K_K512Y_T534K | |
| M188K_T368F_E375Y_S395K_A484E_Q497K_K512Y_T534K | |
| T372Q_E375Y_A484E_K512Y | |
| T372L_E375Y_A484E_K512Y | |
| T372Y_E375Y_K478Y_A484E_K512Y | |
| T368F_E375Y_Q380K_K512Y | |
| T368F_E375Y_A484E_S487E_K512Y | |
| Q183S_E375Y_A484E_K512Y | |
| Q183S_T368F_E375Y_A484E_K512Y | |
| L253A_E375Y_A484E_K512Y | |
| L253A_T368F_E375Y_A484E_K512Y | |
| P129D_T368F_E375Y_A484E_K512Y | |
| T189D_T368F_E375Y_A484E_K512Y | |
| T203D_T368F_E375Y_A484E_K512Y | |
| S252D_T368F_E375Y_A484E_K512Y | |
| S329D_T368F_E375Y_A484E_K512Y | |
| N330D_T368F_E375Y_A484E_K512Y | |
| F360D_T368F_E375Y_A484E_K512Y | |
| K361D_T368F_E375Y_A484E_K512Y | |
| T368F_E375Y_T427D_A484E_K512Y | |
| T372Y_E375Y_A484E_K512Y | |
| K361N_E375Y_W436Y_A484E_K512Y_V514G | |
| N62H_T368Y_E375Y_A484Q_K512Y | |
| E375Y_A484Q_K512Y | |
| S215D_T368F_E375Y_A484E_K512Y | |
| T368F_E375Y_I378W_A484E_K512Y | |
| S215D_T368F_E375Y_I378W_A484E_K512Y | |
| S215D_T372Q_E375Y_I378W_A484E_K512Y | |
| D12K_T368F_E375Y_A484E_K512Y | |
| D12R_T368F_E375Y_A484E_K512Y | |
| D12M_T368F_E375Y_A484E_K512Y | |
| D66K_T368F_E375Y_A484E_K512Y | |
| D66R_T368F_E375Y_A484E_K512Y | |
| D66M_T368F_E375Y_A484E_K512Y | |
| D12A_E375Y_P477D_A484E_K512Y | |
| D12A_D66A_T368F_E375Y_P477D_A484E_K512Y | |
| T368F_E375Y_A484E_511.1G_511.2S_K512Y_512.1G_512.2S | |
| T368F_E375Y_A484E_507.1E_507.2V_507.3D_507.4G_507.5Y_K512Y | |
| T368F_E375Y_A484E_511.1G_511.2S_512.1G_512.2S | |
| T368F_E375Y_A484E_511.1K_511.2S_512.1G_512.2S | |
| F198W_T368F_I370W_T372Q_E375Y_A484E_K512Y | |
| F198W_T368F_I370W_T372Q_E375Y_I378W_A484E_K512Y | |
| F198W_S215D_T368F_I370W_T372Q_E375Y_A484E_K512Y | |
| F198W_S215D_T368F_I370W_T372Q_E375Y_I378W_A484E_K512Y | |
| F198W_S215D_T368F_I370W_T372Q_I378W_E375Y_P455D_A484E_K512Y | |
| T368F_E375Y_P477D_A484E_K512Y | |
| T368F_E375Y_P477K_A484E_K512Y | |
| T368F_E375Y_P477Q_A484E_K512Y | |
| N251Q_T368F_E375Y_A484E_K512Y | |
| T368F_E375Y_A484E_Q497K_K512Y_K575A | |
| T368F_E375Y_L381E_A484E_K512Y | |
| T368F_E375Y_N387M_A484E_K512Y | |
| T368F_E375Y_L381E_N387M_A484E_K512Y | |
| T368F_E375Y_L384R_A484E_K512Y | |
| T368F_E375Y_L384R_N387M_A484E_K512Y | |
| T368F_E375Y_A484E_K512Y_K575A | |
| T368F_E375Y_A484E_K512Y_K555A | |
| T368F_E375Y_V399Y_A484E_Q497K_K512Y_K575A | |
| I93Y_T368F_E375Y_A484E_Q497K_K512Y_K575A | |
| T368F_E375Y_S395K_A484E_Q497K_K512Y_K575A | |
| I170F_E375Y_A484E_K512Y | |
| I170R_E375Y_A484E_K512Y | |
| A176E_E375Y_A484E_K512Y | |
| A176T_E375Y_A484E_K512Y | |
| A176V_E375Y_A484E_K512Y | |
| Q180L_E375Y_A484E_K512Y | |
| F181P_E375Y_A484E_K512Y | |
| K182P_E375Y_A484E_K512Y | |
| Q183D_E375Y_A484E_K512Y | |
| Q183K_E375Y_A484E_K512Y | |
| L185D_E375Y_A484E_K512Y | |
| L185K_E375Y_A484E_K512Y | |
| A190E_E375Y_A484E_K512Y | |
| A190F_E375Y_A484E_K512Y | |
| A190L_E375Y_A484E_K512Y | |
| A190P_E375Y_A484E_K512Y | |
| A190T_E375Y_A484E_K512Y | |
| A190V_E375Y_A484E_K512Y | |
| G191A_E375Y_A484E_K512Y | |
| G191P_E375Y_A484E_K512Y | |
| L253E_E375Y_A484E_K512Y | |
| K361P_E375Y_A484E_K512Y | |
| D365E_E375Y_A484E_K512Y | |
| D365P_E375Y_A484E_K512Y | |
| E375Y_L381F_A484E_K512Y | |
| E375Y_L381K_A484E_K512Y | |
| E375Y_L381R_A484E_K512Y | |
| E375Y_S388A_A484E_K512Y | |
| E375Y_E508R_A484E_K512Y | |
| E375Y_E508V_A484E_K512Y | |
| E375Y_A484E_K512Y_D523F | |
| E375Y_A484E_K512Y_D523L | |
| E375Y_A484E_K512Y_D523R | |
| E375Y_A484E_Q497K_K512Y | |
| E375Y_A484K_Q497K_K512Y | |
| T368F_E375Y_E420R_A484E_K512Y | |
| T368F_E375Y_E420M_A484E_K512Y | |
| E375Y_L384M_A484E_K512Y | |
| E375Y_E420R_A484E_K512Y | |
| E375Y_E420M_A484E_K512Y | |
| E375Y_P477E_A484E_K512Y | |
| E375Y_P477K_A484E_K512Y | |
| E375Y_P477Q_A484E_K512Y | |
| N251Q_E375Y_A484E_K512Y | |
| E375Y_A484E_Q497K_K512Y_K575A | |
| E375Y_L381E_A484E_K512Y | |
| E375Y_N387M_A484E_K512Y | |
| E375Y_L381E_N387M_A484E_K512Y | |
| E375Y_L384R_A484E_K512Y | |
| E375Y_L384R_N387M_A484E_K512Y | |
| E375Y_A484E_K512Y_K575A | |
| E375Y_A484E_K512Y_K555A | |
| E375Y_K392A_A484E_K512Y | |
| E375Y_V399Y_A484E_Q497K_K512Y_K575A | |
| I93Y_E375Y_A484E_Q497K_K512Y_K575A | |
| E375Y_S395K_A484E_Q497K_K512Y_K575A | |
| T368F_E375Y_P477E_A484E_K512Y | |
| T368F_E375Y_P477K_A484E_K512Y | |
| T368F_E375Y_P477Q_A484E_K512Y | |
| N251Q_T368F_E375Y_A484E_K512Y | |
| T368F_E375Y_A484E_Q497K_K512Y_K575A | |
| T368F_E375Y_L381E_A484E_K512Y | |
| T368F_E375Y_N387M_A484E_K512Y | |
| T368F_E375Y_L381E_N387M_A484E_K512Y | |
| T368F_E375Y_L384R_A484E_K512Y | |
| T368F_E375Y_L384R_N387M_A484E_K512Y | |
| T368F_E375Y_A484E_K512Y_K575A | |
| T368F_E375Y_A484E_K512Y_K555A | |
| T368F_E375Y_K392A_A484E_K512Y | |
| T368F_E375Y_V399Y_A484E_Q497K_K512Y_K575A | |
| I93Y_T368F_E375Y_A484E_Q497K_K512Y_K575A | |
| T368F_E375Y_S395K_A484E_K512Y_K575A | |
| T368F_E375Y_K392R_A484E_K512Y | |
| T368F_E375Y_K422R_A484E_K512Y | |
| T368F_E375Y_K392M_A484E_K512Y | |
| T368F_E375Y_K392W_A484E_K512Y | |
| T368F_E375Y_K422M_A484E_K512Y | |
| T368F_E375Y_K422W_A484E_K512Y | |
| T368F_E375Y_A484E_K512Y | |
| S215D_T368F_T372Q_E375Y_I378W_A484E_K512Y | |
| D66K_T368F_E375Y_A484E_K512Y | |
| D66R_T368F_E375Y_A484E_K512Y | |
| D66M_T368F_E375Y_A484E_K512Y | |
| D12A_D66A_T368F_E375Y_P477D_K512Y | |
| D12A_D66A_T368F_E375Y_P477D_A484E_K512Y | |
| T368F_E375Y_A484E_511.1K_511.2S_512.1G_512.2K | |
| E375Y_N251K_A484E_K512Y | |
| E375Y_K422A_A484E_K512Y | |
| E375Y_Y390A_A484E_K512Y | |
| E375Y_Q303K_A484E_K512Y | |
| E375Y_N313K_A484E_K512Y | |
| E375Y_A484E_K512Y_D570K | |
| T368F_E375Y_L384M_A484E_K512Y | |
| E375Y_P477D_A484E_K512Y | |
| T368F_E375Y_P477D_A484E_K512Y | |
| T368F_E375Y_S395K_A484E_Q497K_K512Y_K575A | |
| F137N_E375Y_I378K_A484E_K512Y | |
| P300E_Y315L_E375Y_A484E_K512Y | |
| P300G_Y315V_E375Y_A484E_K512Y | |
| E375Y_A484E_K512Y | |
| N62H_E375Y_A484E_K512Y | |
| E375Y_A484E_E508R_K512Y | |
| T372Q_E375Y_A484E_E508R_K512Y | |
| P300E_Y315L_T372Q_E375Y_A484E_K512Y | |
| T204E_E375Y_A484E_E508R_K512Y | |
| P300E_Y315L_E375Y_A484E_K512Y | |
| P477D | pyrophosphate release |
| P477K | pyrophosphate release, |
| | phosphate interaction |
| V399F | processivity |
| V399Y | processivity |
| Q380D | phosphate interaction |
| N251R | pyrophosphate release |
| L567R | translocation/template |
| | interactions |
| Q380R | phosphate interaction |
| F572K | template |
| N387F | |
| N387W | |
| T189K | |
| S487E | metal coordination |
| K529N | |
| T573A | |
| N387L | |
| L389W | |
| A484Y | |
| F198W | |
| I370W | |
| I378S | |
| C455D | |
| A484Q | |
| T368G_E375Y_A484E_K512Y | |
| E375Y_A484E_K512Y | |
| A484E S487E | metal coordination |
| V247E S459D A484E | metal coordination |
| S459D A484E | metal coordination |
| S459D | metal coordination |
| V247E | metal coordination |
| V247E S459E A484E | metal coordination |
| S459E A484E | metal coordination |
| S459E | metal coordination |
| A484E S487D | metal coordination |
| S487D | metal coordination |
| Q380K | phosphate interaction |
| Q380H | phosphate interaction |
| Q380E | phosphate interaction |
| A486A | phosphate interaction |
| A486K | phosphate interaction |
| A486R | phosphate interaction |
| A486M | phosphate interaction |
| A484K | phosphate interaction |
| A484R | phosphate interaction |
| A484M | phosphate interaction |
| E515K | phosphate interaction |
| E515R | phosphate interaction |
| P477R | phosphate interaction |
| D12A D66A T368F E375Y A484E K512Y | |
| T368F E375Y G511.1G K512Y K512.1G | dye interaction |
| G511 G511.1G 511.2S K512Y K512.1G 512.2S | dye interaction |
| G511 G511.1E 511.2V 511.3D 511.4G K512Y | dye interaction |
| L253A T368F E375Y K512Y | |
| I179W T368F E375Y K512Y | |
| T368F I370H E375Y K512Y | |
| Y101K | translocation |
| M188K | translocation |
| T189K | translocation |
| Q303K | translocation |
| N313K | translocation |
| S395K | translocation |
| F414K | translocation |
| Q497K | translocation |
| Y500K | translocation |
| A531K | translocation |
| G532K | translocation |
| T534K | translocation |
| P558K | translocation |
| D570K | translocation |
| F572K | translocation |
| I574K | translocation |
| K64A | translocation |
| K305A | translocation |
| K392A | translocation |
| K402A | translocation |
| K422A | translocation |
| R496A | translocation |
| K529A | translocation |
| K538A | translocation |
| K555A | translocation |
| K575A | translocation |
| N251K | pyrophosphate release |
| N251Q | pyrophosphate release |
| N251D | pyrophosphate release |
| P477Q | pyrophosphate release |
| P477E | pyrophosphate release |
| P477R | pyrophosphate release |
| P477H | pyrophosphate release |

[0178] Compositions, kits, and systems (e.g., sequencing systems) including the modified recombinant polymerases with decreased rate constants are features of the invention, as are methods employing the modified recombinant polymerases (e.g., methods of sequencing or making DNA). Methods for generating recombinant polymerases are also featured, as described in greater detail below, as are the resulting polymerases. Thus, one aspect provides a modified recombinant Φ29-type DNA polymerase comprising one or more mutations (e.g., amino acid substitutions or insertions) relative to a parental polymerase at one or more positions selected from the group consisting of: a) positions that form a binding site for a metal ion that interacts with an epsilon and/or digamma phosphate of a bound nucleotide analog having five or more phosphate groups; b) positions 372-397 and 507-514; c) positions that form a binding site for a terminal fluorophore on a phosphate-labeled nucleotide analog, particularly hexaphosphate analogs; d) positions at an intramolecular interface in a closed conformation of a ternary complex comprising the polymerase, a DNA, and a nucleotide or nucleotide analog; e) positions that form a binding site for a polyphosphate group of a bound nucleotide or nucleotide analog; f) positions that interact with the base of a bound nucleotide or nucleotide analog; and g) positions that interact with a bound DNA; wherein numbering of positions is relative to wild-type Φ29 polymerase. Preferably, the one or more mutations comprise at least one mutation other than a 514Y, 514W, 514F, 514I, 514K, 259S, 370V, 370K, 372D, 372E, 372R, 372K, 372N, 372L, 387A, 387D, 478D, 478E, 478R, 480K, 480M, 480R, 371Q, 379E, 379T, 486D, 486A, 188A, 188S, 254F, 254V, 254A, 390F, or 390A substitution. The modified polymerase optionally exhibits a decreased first rate constant, balanced first and second rate constants, and the like as for the embodiments described above.

[0179] A number of relevant positions and mutations are described herein. For example, the modified polymerase can comprise at least one amino acid substitution at least one residue selected from the group consisting of positions 484, 249, 179, 198, 211, 255, 259, 360, 363, 365, 370, 372, 378, 381, 383, 387, 389, 393, 433, 478, 480, 514, 251, 371, 379, 380, 383, 458, 486, 101, 188, 189, 303, 313, 395, 414, 497, 500, 531, 532, 534, 558, 570, 572, 574, 64, 305, 392, 402, 422, 496, 529, 538, 555, 575, 254, and 390. Exemplary modified polymerases include those with at least one amino acid substitution or combination of substitutions selected from the group consisting of: an amino acid substitution at position 484; an amino acid substitution at position 198; an amino acid substitution at position 381; A484E; A484Y; N387L; T372Q; T372Y; T372Y and K478Y; K478Y; I370W; F198W; L381A; T368F; A484E, E375Y, K512Y, and T368F; A484Y, E375Y, K512Y, and T368F; N387L, E375Y, K512Y, and T368F; T372Q, E375Y, K512Y, and T368F; T372L, E375Y, K512Y, and T368F; T372Y, K478Y, E375Y, K512Y, and T368F; I370W, E375Y, K512Y, and T368F; F198W, E375Y, K512Y, and T368F; L381A, E375Y, K512Y, and T368F; and E375Y, K512Y, and T368F, as well as others described herein. As another example, the modified polymerase can include an insertion of at least one amino acid (e.g., 1-7 amino acids, e.g., glycine) within residues 372-397 and/or 507-514 (e.g., after residue 374, 375, 511, and/or 512). Additional exemplary mutations and mutation combinations are provided herein, e.g., in Tables 13 and 16 and FIGS. 34-35.

[0180] As will be appreciated, recombinant polymerases that exhibit slow steps can also include additional mutations (e.g., amino acid substitutions, deletions, insertions, exogenous features at the N- and/or C-terminus, and/or the like) which confer one or more additional desirable properties, e.g., reduced or eliminated exonuclease activity, increased closed complex stability, reduced or increased branching, selectivity for particular metal cofactors, increased yield, increased thermostability, increased accuracy, increased speed, and/or increased readlength.

[0181] Polymerase Reaction Conditions

[0182] Recombinant polymerases of the invention are optionally modified in a manner in which the relative rates of steps of the polymerization reaction are changed, for example, such that the polymerase is capable of showing two slow step characteristics. The reaction conditions can also affect reaction rates. Reaction conditions can thus be manipulated, for example, to further slow a step or steps which are already slowed in a modified polymerase, or to slow an additional step, such that the resulting polymerase system exhibits two slow step behavior.

[0183] The polymerase reaction conditions include, e.g., the type and concentration of buffer, the pH of the reaction, the temperature, the type and concentration of salts, the presence of particular additives which influence the kinetics of the enzyme, and the type, concentration, and relative amounts of various cofactors, including metal cofactors. Manipulation of reaction conditions to achieve or enhance two slow step behavior of polymerases is described in detail in U.S. patent application Ser. No. 12/414,191 filed Mar. 30, 2009, and entitled “Two slow-step polymerase enzyme systems and methods.”

[0184] Enzymatic reactions are often run in the presence of a buffer, which is used, in part, to control the pH of the reaction mixture. The type of buffer can in some cases influence the kinetics of the polymerase reaction in a way that can lead to two slow-step kinetics. For example, in some cases, use of TRIS as buffer is useful for obtaining a two slow-step reaction. Suitable buffers include, for example, TAPS (3-{[tris(hydroxymethyl)methyl]amino}propanesulfonic acid), Bicine (N,N-bis(2-hydroxyethyl)glycine), TRIS (tris(hydroxymethyl)methylamine), ACES (N-(2-Acetamido)-2-aminoethanesulfonic acid), Tricine (N-tris(hydroxymethyl)methylglycine), HEPES 4-2-hydroxyethyl-1-piperazineethanesulfonic acid), TES (2-{[tris(hydroxymethyl)methyl]amino}ethanesulfonic acid), MOPS (3-(N-morpholino)propanesulfonic acid), PIPES (piperazine-N,N′-bis(2-ethanesulfonic acid)), and MES (2-(N-morpholino)ethanesulfonic acid).

[0185] The pH of the reaction can influence the kinetics of the polymerase reaction, and can be used as one of the polymerase reaction conditions to obtain a reaction exhibiting two slow-step kinetics. The pH can be adjusted to a value that produces a two slow-step reaction mechanism. The pH is generally between about 6 and about 9. In some cases, the pH is between about 6.5 and about 8.0. In some cases, the pH is between about 6.5 and 7.5. In some cases, the pH is about 6.5, 6.6, 6.7, 6.8, 6.9, 7.0, 7.1, 7.2, 7.3, 7.4, or 7.5.

[0186] The temperature of the reaction can be adjusted in order to obtain a reaction exhibiting two slow-step kinetics. The reaction temperature may depend upon the type of polymerase which is employed. For example, temperatures between 15° C. and 90° C., between 20° C. and 50° C., between 20° C. and 40° C., or between 20° C. and 30° C. can be used.

[0187] In some cases, additives can be added to the reaction mixture that will influence the kinetics of the polymerase reaction in a manner that can lead to two slow-step kinetics. In some cases, the additives can interact with the active site of the enzyme, acting for example as competitive inhibitors. In some cases, additives can interact with portions of the enzyme away from the active site in a manner that will influence the kinetics of the reaction so as to produce a reaction exhibiting two slow steps. Additives that can influence the kinetics include, for example, competitive but otherwise unreactive substrates or inhibitors in analytical reactions to modulate the rate of reaction as described in copending U.S. Utility patent application Ser. No. 12/370,472, the full disclosure of which is incorporated herein by reference in its entirety for all purposes.

[0188] As another example, an isotope such as deuterium can be added to influence the rate of one or more step in the polymerase reaction. In some cases, deuterium can be used to slow one or more steps in the polymerase reaction due to the deuterium isotope effect. By altering the kinetics of steps of the polymerase reaction, in some instances two slow step kinetics, as described herein, can be achieved. The deuterium isotope effect can be used, for example, to control the rate of incorporation of nucleotide, e.g., by slowing the incorporation rate. Isotopes other than deuterium can also be employed, for example, isotopes of carbon (e.g. ¹³C), nitrogen, oxygen, sulfur, or phosphorous.

[0189] As yet another example, additives that can be used to control the kinetics of the polymerase reaction include the addition of organic solvents. The solvent additives are generally water soluble organic solvents. The solvents need not be soluble at all concentrations, but are generally soluble at the amounts used to control the kinetics of the polymerase reaction. While not being bound by theory, it is believed that the solvents can influence the three dimensional conformation of the polymerase enzyme which can affect the rates of the various steps in the polymerase reaction. For example, the solvents can affect steps involving conformational changes such as the isomerization steps shown in FIG. 12. Added solvents can also affect, and in some cases slow, the translocation step. In some cases, the solvents act by influencing hydrogen bonding interactions.

[0190] The water miscible organic solvents that can be used to control the rates of one or more steps of the polymerase reaction in single molecule sequencing include, e.g., alcohols, amines, amides, nitriles, sulfoxides, ethers, and esters and small molecules having more than one of these functional groups. Exemplary solvents include alcohols such as methanol, ethanol, propanol, isopropanol, glycerol, and small alcohols. The alcohols can have one, two, three, or more alcohol groups. Exemplary solvents also include small molecule ethers such as tetrahydrofuran (THF) and dioxane, dimethylacetamide (DMA), dimethylsulfoxide (DMSO), dimethylformamide (DMF), and acetonitrile.

[0191] The water miscible organic solvent can be present in any amount sufficient to control the kinetics of the polymerase reaction. The solvents are generally added in an amount less than 40% of the solvent weight by weight or volume by volume. In some embodiments the solvents are added between about 0.1% and 30%, between about 1% and about 20%, between about 2% and about 15%, and between about 5% and 12%. The effective amount for controlling the kinetics can be determined by the methods described herein and those known in the art.

[0192] One aspect of controlling the polymerase reaction conditions relates to the selection of the type, level, and relative amounts of cofactors. For example, during the course of the polymerase reaction, divalent metal co-factors, such as magnesium or manganese, will interact with the enzyme-substrate complex, playing a structural role in the definition of the active site. For a discussion of metal co-factor interaction in polymerase reactions, see, e.g., Arndt, et al., Biochemistry (2001) 40:5368-5375.

[0193] For example, and without being bound to any particular theory of operation, it is understood that metal cofactor binding in and around the active site serves to stabilize binding of incoming nucleotides and is required for subsequent catalysis, e.g., as shown in steps 106 and 108 of FIG. 12. Other metal cofactor binding sites in polymerases, e.g., in the exonuclease domains, are understood to contribute to different functionality of the overall proteins, such as exonuclease activity. Modulation, and particularly competitive modulation, of divalent metal cofactors to the synthesis reaction can provide substantial benefits in terms of reaction kinetics without a consequent increase in negative reaction events.

[0194] In the synthesis reaction, certain divalent or trivalent metal cofactors, such as magnesium and manganese, are known to interact with the polymerase to modulate the progress of the reaction (See, e.g., U.S. Pat. No. 5,409,811). Other divalent metal ions, such as Ca²⁺, have been shown to interact with the polymerase, such as Φ29 derived polymerases, to negative effect, e.g., to halt polymerization. As will be appreciated, depending upon the nature of the polymerization reaction, environmental conditions, the polymerase used, the nucleotides employed, etc., different metal co-factors will have widely varying catalytic effects upon the polymerization reaction. In the context of the present invention, different metal co-factors will be referred to herein based upon their relative catalytic impact on the polymerization reaction, as compared to a different metal included under the same reaction conditions. For purposes of discussion, a first metal co-factor that interacts with the polymerase complex to support the polymerization reaction to a higher level than a second metal co-factor under the same conditions is termed a “catalytic metal ion” or “catalytic metal.” In preferred aspects, such catalytic metals support the continued, iterative or processive polymerization of nucleic acids under the particular polymerase reaction conditions, e.g., through the addition of multiple bases, while in some cases, a given type of metal cofactor may only support addition of a single base. Such metals may be sufficiently catalytic, depending upon the specific application.

[0195] In certain cases, particularly preferred divalent metal ions or catalytic metals include, e.g., Mn²⁺, and in some cases will include Mg²⁺. Less preferred multivalent metal ions that may provide a sufficient level of catalytic activity depending upon the desired application include, e.g., zinc.

[0196] For purposes of the invention, metal ions that interact with the polymerase but that do not promote the polymerization reaction, and in many cases act to arrest or prevent polymerization, are termed “non-catalytic metals.” Included among the non-catalytic metals for various polymerase systems are calcium, barium, strontium, iron, cobalt, nickel, tin, zinc, and europium. For example, these metals can be added to the polymerization reaction in salt form such as Sr(OAc)₂, Sr(OAc)₂, CaCl₂, ZnCl₂, CaCl₂, or ZnSO₄.

[0197] As described in detail in U.S. patent application Ser. No. 12/414,191 filed Mar. 30, 2009, and entitled “Two slow-step polymerase enzyme systems and methods,” it has been discovered that mixtures of both catalytic and non-catalytic metal ions in the polymerization reaction mixture yields surprisingly beneficial results in this process. In particular, it has been observed that the competitive exchange rate for catalytic and non-catalytic metal ions in nucleic acid polymerases is sufficiently fast that one can exchange catalytic for non-catalytic ions in the reaction complex. Thus, these exchangeable catalytic and non-catalytic cofactors can be contacted with the polymerase complex to first sequester the nucleotide in a non-exchangeable state within the polymerase complex, from which it is substantially less likely to be released. Upon exchange of a non-catalytic cofactor with a catalytic co-factor, the nucleotide will be transitioned into an exchangeable state within the complex, from which it can proceed through an incorporation reaction. Further, the rate of the exchange is such that one can effectively modulate the speed of the polymerase reaction by modulating the relative proportion of catalytic/non-catalytic metal ions in the reaction mixture. In particular, modulating the relative concentrations of these ions effectively modulates the reaction kinetics of individual enzymes, rather than just in bulk. Furthermore, because the nature of the interaction of the complex with calcium ions interferes with both the forward progress of incorporation and the reverse progress of release or branching, one can effectively slow the reaction, or more specifically, increase the time the “to be incorporated” nucleotide is bound, without a consequent increase in the amount of nucleotide released or branching.

[0198] Thus, exemplary additives that can enhance control of kinetic behavior include non-catalytic metal ions, generally provided in a mixture of catalytic and non-catalytic metal ions. The molar ratio of catalytic to non-catalytic metals in the reaction mixture will generally vary depending upon the type of kinetic modulation desired for a given synthesis reaction, where slower incorporation would suggest higher levels of non-catalytic metal ions. Typically, such ratios of catalytic to non-catalytic metals in the reaction mixture will vary from about 10:1 to about 1:10, and preferably, from about 10:1 to about 1:5 (e.g., from about 5:1 to about 1:1 or about 2.5:1 to about 1.5:1), depending upon the desired level of modulation, the particular enzyme system employed, the catalytic and non-catalytic metal cofactors that are used, and the reaction conditions.

[0199] In addition to the presence of such metals at the ratios described herein, the absolute concentration of such metals in the reaction mixtures will typically range from about 0.1 mM to about 10 mM. For example, the reaction can include from about 0.25 mM MnCl₂ to about 1 mM MnCl₂ and from about 0.1 mM CaCl₂ to about 1.5 mM CaCl₂.

[0200] B. Exonuclease-Deficient Recombinant Polymerases

[0201] Many native DNA polymerases have a proof-reading exonuclease function which can yield substantial data analysis problems in processes that utilize real time observation of incorporation events as a method of identifying sequence information, e.g., single molecule sequencing applications. Even where exonuclease activity does not introduce such problems in single molecule sequencing, reduction of exonuclease activity can be desirable since it can increase accuracy (in some cases at the expense of readlength).

[0202] Accordingly, recombinant polymerases of the invention optionally include one or more mutations (e.g., substitutions, insertions, and/or deletions) relative to the parental polymerase that reduce or eliminate endogenous exonuclease activity. For example, relative to the wild-type Φ29 DNA polymerase, one or more of positions N62, D12, E14, T15, H61, D66, D169, K143, Y148, and H149 is optionally mutated to reduce exonuclease activity. Exemplary mutations that can reduce exonuclease activity include, e.g., N62D, N62H, D12A, T151, E141, E14A, D66A, K143D, D145A and D169A substitutions, as well as addition of an exogenous feature at the C-terminus (e.g., a polyhistidine tag). As an additional example, a Y148I substitution can modestly reduce exonuclease activity and provide some improvement in accuracy. Additional exemplary substitutions in the exonuclease domain include N62S, D12N, D12R, D12M, E14Q, H61K, H61D, H61A, D66R, D66N, D66Q, D66K, D66M, D169N, K143R, Y148K, Y148A, Y148C, Y148D, Y148E, Y148F, Y148G, Y148H, Y148L, Y148M, Y148N, Y148P, Y148Q, Y148R, Y148S, Y148T, Y148V, Y148W, and H149M. Additional exemplary mutations and/or combinations of mutations that can reduce or eliminate exonuclease activity can be found herein, e.g., in Table 13 and FIGS. 34 and 35. The polymerases of the invention optionally comprise one or more of these mutations. For example, in one aspect, the polymerase is a Φ29-type polymerase that includes one or more mutations in the N-terminal exonuclease domain (residues 5-189 as numbered with respect to wild-type Φ29).

[0203] C. Recombinant Polymerases with Increased Closed Complex Stability

[0204] In one aspect, the invention features methods of generating recombinant DNA polymerases with modifications that increase the stability of the closed polymerase/DNA complex, compositions that include such polymerases, and methods of using such modified polymerases to, e.g., sequence a DNA template or make a DNA. Any of a number of polymerases, e.g., those described herein or polymerases homologous to those described herein, can be modified to exhibit increased closed polymerase/DNA complex stability using the methods described herein. In a preferred embodiment, a Φ29 polymerase and Φ29 polymerase derivatives, e.g., exonuclease-deficient Φ29 mutants, Φ29-type polymerases, or polymerases homologous to Φ29, can be modified to exhibit this phenotype.

[0205] A closed polymerase/DNA complex is formed, e.g., by Φ29 DNA polymerase, when the Terminal Protein Region 2 (TPR2), exonuclease, thumb, and palm subdomains of Φ29 (FIG. 1 Panels A and B) encircle the DNA binding groove at the polymerization active site, forming a “doughnut” (FIG. 1 Panel B and FIG. 2 Panel A) around the upstream duplex DNA. This conformation enhances polymerase processivity in a manner analogous to sliding clamp proteins (Kamtekar, et al. (2004) “Insights into strand displacement and processivity from the crystal structure of the protein-primed DNA polymerase of bacteriophage phi29.” Mol. Cell. 16: 1035-6). The other Φ29 subdomains represented in FIG. 1 include TPR1 and fingers. It is worth noting that closed complex formation can be independent of the presence of a nucleotide or nucleotide analog.

[0206] Φ29 DNA polymerase mutants lacking the TPR2 subdomain exhibit drastically decreased processivity (Rodriguez, et al. (2005) “A specific subdomain in Φ29 polymerase confers both processivity and strand-displacement capacity” Proc Natl Acad Sci USA 102: 6407-6412), indicating that mutations that stabilize the protein-protein interactions at the interface of these subdomains (FIG. 2 Panel B, example circled) can increase the stability of the closed complex comprising the polymerase and DNA, e.g., a template strand and a primer. An increase in closed polymerase/DNA complex stability can comprise an improvement of at least 30%, e.g., 50% or better, 75% or better, or even 100% or better.

[0207] Mutations that increase the stability of the closed polymerase/DNA complex can indirectly improve polymerase processivity and can generate polymerases that can be of beneficial use in any application where increased read length, speed, and accuracy of polymerization is desirable, e.g., single-molecule sequencing (SMS), e.g., in a zero-mode waveguide (ZMW), SNP genotyping using single base extension methods, real time monitoring of amplification, e.g., RT-PCR methods, and the like. Useful compositions comprising such polymerases can include nucleotide analogs, e.g., analogs labeled with fluorophores, phosphate-labeled nucleotide analogs, and/or labeled nucleotide analogs having, e.g., 3-7 phosphate groups, that the polymerase can incorporate into a DNA. In some embodiments of the compositions, a modified polymerase with improved closed polymerase/DNA complex stability can be immobilized on a surface, e.g., in a ZMW.

[0208] Mutations that can stabilize a closed polymerase/DNA complex include mutations to amino acids regions that correspond to Ala68-Arg76, Tyr405-Gly413, and Gln560-Gly564 of wild type Φ29. These amino acid regions comprise the interface of the exonuclease, TPR2, and thumb subdomains, respectively, and are depicted in FIG. 2 Panels A and B. Mutation of Thr92, in the exonuclease domain, can also stabilize interaction with TPR2 domain. Mutations can be introduced into one or more of these residues to provide additional stability to the closed complex, e.g., by stabilizing the interface of the exonuclease, TPR2, and thumb domains. For example, the hydrophobic environment between domains can be increased to increase complex stability, charged residues can be introduced to add favorable electrostatic interactions (or removed to remove unfavorable interactions), hydrogen bonds can be introduced, and the like. In general terms, a mutation can introduce an intramolecular interaction between domains that is predicted to stabilize the interface (and thus the closed complex) and/or can remove an interaction predicted to destabilize the interface. Thus, strategic mutations such as Thr92Phe, Thr92Ile, Gly410Asp, Asn72Ala, Asn72Ile, Asn72Phe, or Asn72Ser, or combinations thereof such as Thr92Ile and Gly104Asp, can stabilize a closed polymerase/DNA complex. Additional exemplary mutations and/or combinations of mutations that confer increased closed complex stability can be found herein, e.g., in Tables 13 and 16 and FIGS. 34-35. Strategies for mutating and screening polymerases are detailed herein.

[0209] Increases in the stability of a closed polymerase/DNA complex can be measured by comparing a rate of dissociation or the dissociation rate constant (k_{off}) of the modified polymerase from a DNA to k_{off} of the parental polymerase from a DNA. Decreases in k_{off} can correspond to an increase in closed complex stability. In one preferred embodiment, k_{off} can be determined by, e.g., stopped-flow fluorometric analysis, incubating a fluorescently labeled DNA template, e.g., 2-aminopurine-labeled DNA, with a modified polymerase in the presence of an excess of competitor, e.g., unlabelled DNA or heparin. In another embodiment, a preformed complex comprising a modified polymerase and a template DNA can be incubated in the presence of excess competitor DNA or heparin. A time course of activity assays, e.g., primer extension, can measure the fraction of polymerase that remains associated with template. As indicated above, k_{off} is optionally decreased by at least 30%, e.g., by at least 50%, at least 75%, or at least 100%, for the modified recombinant polymerase as compared to the parental polymerase.

[0210] Increases in the stability of a closed polymerase/DNA complex can also be measured by determining the equilibrium dissociation constant K_{d}, where a decrease in K_{d} can correspond to increased closed complex stability. Optionally, K_{d} is decreased by at least 30%, e.g., by at least 50%, at least 75%, or at least 100%, for the modified recombinant polymerase as compared to the parental polymerase. K_{d} can be determined using techniques known in the art, for example, surface plasmon resonance (SPR), fluorescent anisotropy measurements, gel mobility shift assays, or isothermal titration calorimetry (ITC).

[0211] Processivity can be defined as the modified polymerase's extension rate constant (kₑₓₜ) divided by the sum of the extension rate constant and the rate constant for dissociation of the modified polymerase from a DNA (k_{off}), e.g., kₑₓₜ/(kₑₓₜ+k_{off}). As described herein, mutations in a polymerase that improve the stability of a closed polymerase/DNA complex can result in a measurable decrease in k_{off}, which can, accordingly, improve the polymerase's processivity, such that the modified polymerase's processivity is, e.g., at least twice that of the polymerase from which is was derived, or better. In a related aspect, a modified polymerase's processivity can be improved by increasing its extension rate, a phenotype which can be dependent on the type of nucleotide and/or nucleotide analog assayed. The extension rate constant can be determined using techniques known in the art. See, e.g., Korlach et al. (2008) “Long, processive enzymatic DNA synthesis using 100% dye-labeled terminal phosphate-linked nucleotides” Nucleosides Nucleotides Nucleic Acids 27(9):1072-83 (defined as kₑₗ).

[0212] D. Recombinant Polymerases With Decreased Branching Fractions

[0213] During a polymerase kinetic cycle, sampling of each of the possible nucleotides or nucleotide analogs occurs until a correct Watson-Crick pairing is generated (see, e.g., Hanzel, et al. WO 2007/076057 POLYMERASES FOR NUCLEOTIDE ANALOGUE INCORPORATION for a description of the kinetic cycle of a polymerase; see also the section entitled “Polymerase Mediated Synthesis” above). According to structural studies of DNA polymerases complexed with DNA substrates, the primer-terminus can not typically form a covalent bond with an incorrectly paired nucleotide (Berman, et al. (2007) “Structures of phi29 polymerase complexed with substrate: the mechanism of translocation in polymerases.” EMBO J 26: 3494-3505). Chemical linkages between a correctly paired nucleotide and the 3′OH of a preceding base can also fail to form, e.g., due to premature release of the sampled nucleotide from the active site. Sampling is then repeated for the same site, eventually resulting in the physical incorporation of the correct nucleotide. However, the premature release can be misread as an incorporation event by a readout system during, e.g., single molecule sequencing, e.g., where the system monitors residence time of the nucleotide analog at the active site as a proxy for incorporation; this can result in sequence read errors which include a nucleotide “insertion” relative to the correct sequence. This phenomenon is termed “branching” and can generate high error rates in single molecule sequencing, especially when chemically modified nucleotides or nucleotide analogs are used.

[0214] Among other aspects, the invention provides methods for generating recombinant polymerases that comprise modifications that reduce the frequency of branching, which can be useful in any number of applications where accuracy of polymerization is beneficial, e.g., high-throughput sequencing systems, e.g., in a zero-mode waveguide (ZMW), SNP genotyping using single base extension methods, real time monitoring of amplification, e.g., RT-PCR methods, and the like. Also provided are compositions that include such polymerases and methods in which these polymerases can be useful in, e.g., sequencing or making a DNA. In some embodiments, the compositions can also include a nucleotide analog, e.g., a phosphate-labeled nucleotide analog, an analog labeled with a fluorophore, and/or a nucleotide analog comprising from 3-7 phosphate groups, which can be incorporated into a copy nucleic acid by the modified polymerase in response to a DNA template. In some embodiments, the compositions can be present in a sequencing system, e.g. in a zero-mode waveguide, where a polymerase of the invention can optionally be immobilized on a surface.

[0215] Modification of a polymerase, e.g., any of the polymerases described herein, or polymerases homologous to those described herein, by any one or more of the strategies described herein can lower the frequency of these events by creating a more tightly structured binding pocket for non-native nucleotides. Modified polymerases can comprise at least one amino acid substitution or a combination of amino acid substitutions relative to the parental polymerase, such as those listed in Table 5. The modified polymerases can also comprise additional mutations, e.g., T368D, T368E, T368G, E375Y, E375W, K512Y, K512F, K512W, K512L, K512I, K512V, or K512H substitutions or other mutations described herein. In one embodiment, a polymerase that exhibits a reduced branching frequency can comprise at least one mutation that provides other useful features such as reduced exonuclease activity (e.g., N62D, D12A, D66A, and/or T151 substitutions relative to a wild-type Φ29 polymerase) or other properties described herein and/or at least one exogenous feature.

[0216] A number of specific examples of a modified polymerase, e.g. modified to lower the frequency of branching events, are described herein. The binding pocket is a portion of the polymerase that encompasses the nucleotide binding site and analog base during the pairing of a nucleotide analog with a template DNA. Because of the physical proximity of the binding pocket to the incoming nucleotide or nucleotide analog, mutations to this region can affect the branching fraction. However, mutations that lower the branching fraction are not limited to this area of the polymerase. For example, where amino acid positions are identified relative to a wild-type Φ29 DNA polymerase (e.g., SEQ ID NO:1), these modifications, in addition to those described above, can include any one of, or any combination of: an amino acid substitution at position 153, an amino acid substitution at amino acid position 191, an amino acid substitution at position 388, an amino acid substitution at position 422, an amino acid substitution at position 128; an amino acid substitution at position 253; an amino acid substitution at position 504; an amino acid substitution at position 143; an amino acid substitution at position 183; an amino acid substitution at position 236; an amino acid substitution at position 363; an amino acid substitution at position 215; an amino acid substitution at position 43; an amino acid substitution at position 159; and/or any of the following mutations or combinations thereof: S215D; S43D; T159D; P153L; G191A; T368F; T368P; T368S; T368V; T368N; T368A; T373N; T373V; T373C; 1378V; 1378F; K379S; K379A; S388A; S388T; K422R; F128M; F128V; 1504V; K143D; K512R; Q183S; R236N; L253A; F363Y; L253A, F363Y, and L480M; T368F, K379S, E375Y, and K512Y; T368F and K379S; T368G and K379S; T368F and T373A; E375Y, K512Y and K379S; E375Y, K512Y and T368F; T368F and V514K; T368F and K379T; S388A and P153L; E375Y, K512Y and T368G; T368G and T373A; E375W and T368G; I378K and K379S; T368F and I378K; T368G and I378K; T368G and V514K; E375W and K379T; T373A and K379S; E375W and T373A; E375Y, K512Y and T373A; E375W and I378K; E375Y, K512Y and I378K; T373A and V514K; T373A and I378K; E375Y, K512Y and K379T; I378K and V514K; E375W and V514K; T368G and K379T; and E375Y, K512Y and V514K. A list of specific useful Φ29 mutants and the corresponding reduced branching fraction that they exhibit is provided in Table 5 below. Characteristics of additional useful Φ129 mutants are provided in Table 6. For comparison, wild-type Φ29 polymerase exhibits a branching fraction of about ≧40% for, e.g., an A488dA4P nucleotide analog. Values in the tables were determined as described in Example 1. Additional exemplary mutations and/or mutation combinations that confer reduced branching fraction can be found herein, e.g., in Tables 13 and 16 and FIGS. 34-35.

TABLE 5

| | Branching |
|---|---|
| Mutation Name | Fraction (%) |
| N62D_T368F_K379S_E375Y_K512Y | 8.01 |
| N62D_T368F_K379S | 6.47 |
| N62D_T368P | 6.58 |
| N62D_T368G_K379S | 6.96 |
| N62D_T368F_T373A | 6.99 |
| N62D_T368S | 7.32 |
| N62D_E375Y_K512Y_K379S | 7.66 |
| N62D_E375Y_K512Y_T368F | 8.53 |
| N62D_T368F_V514K | 8.58 |
| N62D_T368F_K379T | 8.71 |
| N62D_S388A_P153L | 8.93 |
| N62D_T368V | 9.94 |
| N62D_E375Y_K512Y_T368G | 10.14 |
| N62D_T368D | 10.41 |
| N62D_T368G_T373A | 10.69 |
| N62D_T368N | 10.73 |
| N62D_E375W_T368G | 12.04 |
| N62D_G191A | 12.32 |
| N62D_I378K_K379S | 12.47 |
| N62D_K379A | 12.75 |
| N62D_T368F_I378K | 13.30 |
| N62D_K379S | 13.34 |
| N62D_T368F | 13.55 |
| N62D_T368G_I378K | 13.59 |
| N62D_T368G_V514K | 14.01 |
| N62D_E375W_K379T | 14.66 |
| N62D_T373A_K379S | 14.72 |
| N62D_S388T | 14.82 |
| N62D_E375W_T373A | 16.40 |
| N62D_T368A | 16.60 |
| N62D_I378V | 17.38 |
| N62D_E375Y_K512Y_T373A | 17.54 |
| N62D_T373N | 17.63 |
| N62D_E375W_I378K | 17.70 |
| N62D_E375Y_K512Y_I378K | 17.83 |
| N62D_T373A_V514K | 17.87 |
| N62D_T373A_I378K | 17.89 |
| N62D_T373V | 18.26 |
| N62D_I378F | 18.32 |
| N62D_E375Y_K512Y_K379T | 18.72 |
| N62D_I378K_V514K | 18.74 |
| N62D_T368E | 18.82 |
| N62D_E375W_V514K | 19.68 |
| N62D_T368G_K379T | 19.77 |
| N62D_T373C | 20.54 |
| N62D_K422R | 20.68 |
| N62D_T368G | 21.48 |
| E375Y_K512Y_V514K | 24.90 |
| N62D_F128M | 8.86 |
| N62D_F128V | 8.35 |
| L253A_F363Y_L480M | 9.59 |
| N62D_I504V | 5.24 |
| N62D_K143D | 9.66 |
| N62D_K512R | 8.63 |
| N62D_Q183S | 9.62 |
| N62D_R236N | 9.71 |

TABLE 6
Characterization of modified recombinant Φ29 polymerases including S215D,
S43D, and T159D substitutions.

| | Vmax | Km | kcat | specificity | |
|---|---|---|---|---|---|
| Mutation | (RFU/sec) | (μM) | (bpm) | (kcat/km) | BF %^{a} |
| N62D_S215D_T368F_E375Y_K512Y | 15621.43 | 2.62 | 150.62 | 57.41 | 6.41 |
| S43D_N62D_T368F_E375Y_K512Y | 14682.09 | 3.53 | 141.56 | 40.13 | 10.01 |
| N62D_T159D_T368F_E375Y_K512Y | 13408.60 | 2.21 | 129.28 | 58.59 | 9.51 |
| N62D_T368F_E375Y_K512Y | 13343.50 | 2.00 | 128.65 | 64.18 | 11.09 |

^{a}BF: branching fraction

[0217] As noted, the branching fraction, e.g., % branching, is a relative measure of the number of times a correctly paired base, e.g., a Watson-Crick paired base, leaves the active site of the polymerase without forming a phosphodiester bond with the 3′ OH of the primer-terminus relative to the total number of interactions that occur between the nucleotide (or nucleotide analog) and the binding pocket of the polymerase, e.g., the total number of opportunities the nucleotide or nucleotide analog, e.g., A488dA4P in FIG. 3, has to correctly pair and incorporate. Branching is expressed as a percentage of the dissociation events vs. the total sum events, e.g., dissociation and association events. For example, for an N62D/T368G Φ29 mutant polymerase, for every 100 times an A488dA4P analog interacts with the binding pocket of this polymerase, 21.477 of the events are non-productive dissociation events, e.g., wherein the analog dissociates from the polymerase instead of participating in a polymerization reaction.

[0218] The branching fraction represented in Tables 5 and 6 is measured by “loading” a polymerase active site with a cognate-matching nucleotide analog that can bind in the +1 and +2 positions. In the absence of divalent cation this nucleotide cannot be incorporated into the DNA strand, so will pair with the template nucleotide at the +1 position but be released at some frequency specific for that analog/polymerase combination, e.g., the branching rate. This ‘loading’ reaction is then followed by a ‘chase’ reaction consisting of a divalent cation that supports extension, e.g., Mn²⁺), and a terminating-type nucleotide analog, e.g., a dideoxynucleotide, comprising the same base as the cognate-matching analog in the loading step.

[0219] The dideoxy-analog will be incorporated into any +1 sites that are unoccupied and, once added, preclude further extension. Hence polymerase active sites that are already occupied by a paired analog base extend to the +2 position, while those that are not occupied (i.e. “branched”) incorporate the dideoxy-type analog at +1 and do not extend, resulting in a single base addition. The extension products of this reaction are visualized by standard separation methods, e.g., gel or capillary electrophoresis, and the ratio of terminated product that is generated when a dideoxynucleotide is incorporated at the +1 position divided by the total terminated product, e.g., when a dideoxynucleotide is incorporated at both the +1 and +2 positions, indicates the fraction of ‘branched’ events that occur.

[0220] The branching fraction exhibited by a modified polymerase, e.g., a modified Φ129 polymerase, a modified Φ29-type polymerase, or a modified exonuclease-deficient Φ129 polymerase, can be less than a branching fraction exhibited by the parental polymerase for a given nucleotide analog or, e.g., less than 25% for a phosphate-labeled nucleotide analog, less than 20% for the phosphate-labeled analog, less than 15% for the phosphate-labeled analog, or less than 10% for the phosphate-labeled analog.

[0221] In some embodiments, the modified polymerase that exhibits a reduced frequency of branching can also exhibit a Kₘ for a given phosphate-labeled nucleotide analog, e.g., any of the phosphate-labeled nucleotide analogs described herein, that is less than 10 μM. For enzymes obeying simple Michaelis-Menten kinetics, kinetic parameters are readily derived from rates of catalysis measured at different substrate concentrations. The Michaelis-Menten equation, V=Vₘₐₓ[S]([S]+Kₘ)⁻¹ relates the concentration of uncombined substrate ([S], approximated by the total substrate concentration), the maximal rate (Vₘₐₓ, attained when the enzyme is saturated with substrate), and the Michaelis constant (Kₘ, equal to the substrate concentration at which the reaction rate is half of its maximal value), to the reaction rate (V). To determine a Kₘ for a particular analog a series of extension reactions are performed with a varying concentration of the analog of interest with a fixed, saturating concentration of native nucleotides. A fit of the rate versus the substrate concentration generates estimation of the −Kₘ as the slope of this line. Modified polymerases that exhibit reductions in branching fraction can also exhibit increased accuracy of nucleotide incorporation. The modified polymerases optionally exhibit improved specificity, e.g., as assessed by determining k_{cat}/Kₘ.

[0222] E. Recombinant Polymerases With Altered Divalent Metal Cofactor Selectivity

[0223] The phosphoryl transfer reaction of DNA polymerases is typically catalyzed by a two-metal ion mechanism, where two divalent metal ions, e.g., Mg⁺⁺ and/or Mn⁺⁺, complexed with the DNA polymerase facilitate the incorporation of a nucleotide into the 3′OH of the extension product. One of the metal ions is proposed to interact with the 3′OH of the primer strand, thereby facilitating its attack on the α-phosphate of the incoming nucleotide. Both metal ions are believed to stabilize the transition state that occurs during the course of the extension reaction.

[0224] During the course of the polymerase reaction, divalent metal cofactors, such as magnesium or manganese, will interact with the enzyme-substrate complex, playing a role in catalysis as well as a structural role in definition of the active site. For a discussion of metal cofactor interaction in polymerase reactions, see, e.g., Arndt, et al., Biochemistry (2001) 40:5368-5375. For example, and without being bound to any particular theory of operation, it is understood that metal cofactor binding in and around the active site serves to stabilize binding of incoming nucleotides. For further details regarding the effect of metal cofactors on polymerase kinetics and nucleic acid synthesis reactions, see Bjornson et al. PCT Application Serial Number PCT/US2009/002003 “TWO SLOW-STEP POLYMERASE ENZYME SYSTEMS AND METHODS,” incorporated herein by reference in its entirety for all purposes.

[0225] In the synthesis reaction, certain divalent or trivalent metal cofactors such as magnesium and manganese are known to interact with the polymerase to modulate the progress of the reaction (See, e.g., U.S. Pat. No. 5,409,811). As will be appreciated, depending upon the nature of the polymerization reaction, environmental conditions (e.g., temperature, pH, etc.), the polymerase used, the nucleotides employed, etc., different metal co-factors (and when two or more cofactors are included in the reaction conditions, the ratios of such cofactors) will have widely varying catalytic effects upon the polymerization reaction. For example, under conditions where the ratio of Mg⁺⁺ to Mn⁺⁺ is, e.g., greater than 1, polymerases can exhibit increased branching fractions. Therefore, in applications where branching is deleterious to readout accuracy, it may be necessary to reduce or eliminate Mg⁺⁺ from the reaction conditions. However, the same polymerases that exhibit increased branching in the presence of Mg⁺⁺ can also display undesirable kinetic properties when Mg⁺⁺ is reduced or eliminated from the reaction conditions, e.g., reduced processivity and/or fidelity in the absence of Mg⁺⁺.

[0226] In light of the above observations, polymerases that are tolerant to Mg⁺⁺ (e.g., polymerases which do not exhibit increased branching, etc. in single molecule sequencing reactions in the presence of Mg⁺⁺) are desirable. Among other aspects, the present invention provides such polymerases, particularly Φ29-type polymerases. For example, polymerases of the invention optionally comprise one or more mutations to enhance or confer Mg⁺⁺ tolerance (e.g., the reduction or elimination of increased branching in the presence of Mg⁺⁺). Positions (identified relative to wild-type Φ29 DNA polymerase) that are optionally modified to enhance Mg⁺⁺ tolerance preferably include L253. Specific exemplary mutations at this position include L253M, L253G, L253Q, L253I, L253Y, L253D, preferably L253H or L253S, more preferably L253C, and still more preferably L253A. Other positions and substitutions of potential interest include, e.g., K13, V250, K402, I474, K131, V250A, V250F, K402A, I474H, and I474C. Combinations comprising mutations influencing Mg' tolerance include, as just a few examples, L253A and A484E; N62D, L253A, E375Y, A484E and K512Y; L253A, E375Y, A484E and K512Y; N62D, L253A, E375Y and K512Y; and L253A, E375Y and K512Y; see also other combinations listed herein, e.g., in Tables 13 and 16 and FIGS. 34 and 35. Polymerases comprising mutations conferring Mg⁺⁺ tolerance optionally also include one or more additional mutations or combinations of mutations noted herein and/or one or more exogenous features at the N- and/or C-terminal region of the polymerase (e.g., a polyhistidine tag, e.g., a His10 tag, at the N- and/or C-terminal region, a Btag at the N-terminal region, and combinations thereof).

[0227] F. Recombinant Polymerases with Increased Thermostability and Yield

[0228] As noted, various combinations of the individual mutations described herein can be introduced into recombinant polymerases to confer a variety of advantageous properties on the polymerases. However, introducing additional mutations into a polymerase can have deleterious effects on its thermostability and/or on yield when the polymerase is purified. See, for example, the left-hand portion of FIG. 40, which charts protein yield from a high throughput purification procedure for three recombinant Φ29 polymerases: one with N62D, L253A, E375Y, A484E, and K512Y substitutions, one with L253A, E375Y, A484E, and K512Y substitutions and a C-terminal His10 tag, and one with L253A, E375Y, A484E, D510K, and K512Y substitutions and a C-terminal His10 tag. We have found that protein yield can decrease dramatically with increasing number of mutations in these three polymerases.

[0229] Mutations that increase yield are thus desirable. Mutations that increase protein thermostability are also desirable, not only because such mutations often also increase protein yield, but also because increased thermostability can result in longer lifetime of the polymerase, e.g., under assay conditions used in single molecule sequencing.

[0230] Mutations at a number of positions can increase protein yield and/or thermostability. Positions of particular interest include, e.g., V250I , E239G, Y224, E515, F526, and E508, where positions are identified relative to wild-type Φ29 polymerase (SEQ ID NO:1). Suitable substitutions at these positions include, for example, V250I, E239G, Y224K, E515K, E515Q, F526L, E508K, and E508R, as well as Y224Q, Y224R, E515H, E515Y, E515N, E515P, E515R, E515S, E515A, F526Q, F526K, F526I, F526T, F526M, and F526V.

[0231] As a few examples, we have found that an E239G substitution can increase protein yield approximately twofold in a variety of contexts. A V250I substitution can increase protein yield approximately 1.6 fold. A Y224K substitution can increase protein yield approximately fourfold. An E515K substitution can increase yield approximately eightfold, while an E515Q substitution can increase protein yield approximately twofold and can also increase accuracy by reducing the number of missing bases; however, both substitutions tend to increase pulse widths. An F526L substitution can increase protein yield approximately tenfold, but can also increase pausing. E508K and E508R substitutions also can increase yield approximately 1.2 fold and threefold, respectively.

[0232] As shown in the right-hand portion of FIG. 40, addition of such mutations to a recombinant polymerase can considerably increase protein yield. Addition of E239G, a combination of E239G and Y224K, and a combination of E239G, Y224K, and F526L to a polymerase comprising L253A, E375Y, A484E, D510K, and K512Y and a C-terminal His10 tag can produce successively greater increases in yield.

[0233] Protein thermostability can be assayed by any of a variety of techniques known in the art. For example, polymerase thermostability can be assessed basically as described in Vedadi et al. (2006) Proc Natl Acad Sci 103:15835-15840. Purified polymerase is incubated with the florescent dye SYPRO® orange, which binds more strongly to partially unfolded protein than to folded or unfolded protein. Fluorescence is monitored as the temperature is increased. The unfolding temperature is determined as the temperature of the midpoint between the initial minimum and maximum in florescent intensity. A recombinant polymerase with increased thermostability thus has a higher unfolding temperature, while a polymerase with decreased thermostability has a lower unfolding temperature.

[0234] In an otherwise wild-type Φ29 polymerase, an A484E substitution can be destabilizing, resulting in a decrease of greater than one degree in the unfolding temperature. An L253A substitution can be equally destabilizing. A K512Y substitution can be somewhat less destabilizing, and an E375Y substitution can be slightly destabilizing. We have found that a T368F or T368Y substitution, in contrast, can be strongly stabilizing, providing an increase in unfolding temperature of approximately one degree. The combination of E375Y, K512Y, and T368F can produce a polymerase with an unfolding temperature close to wild-type. A Y224K substitution can also be strongly stabilizing, increasing the unfolding temperature by approximately one degree.

[0235] Polymerase thermostability can also be assessed by measuring activity after incubation of the polymerase at different temperatures, optionally in the presence of a substrate and nucleotides or nucleotide analogs. An exemplary thermal inactivation assay is schematically illustrated in FIG. 38 Panel A. A ternary complex including the polymerase, a gapped duplex DNA substrate bearing a fluorophore and a quencher, and a cognate nucleotide triphosphate or analog (e.g., dATP or a hexaphosphate analog thereof) is assembled in the presence of Sr⁺⁺. Samples of the complex are exposed to temperatures between 30° C. and 50° C. for 30 minutes. Nucleotides (the remaining dNTPs) and Mg⁺⁺ are then added; polymerase which has remained active displaces the oligonucleotide bearing the quencher, producing a fluorescent signal.

[0236] Thermal inactivation profiles for a series of Φ29 recombinant polymerases are shown in FIG. 38 Panel B. As seen in Panel B, addition of Y224K, E239G, V250I, and E515K substitutions to Φ29 polymerase carrying L253A, E375Y, A484E, and K512Y can increase thermostability. Addition of 1467V has only a minor effect, while successive additions of E508R and F526L can further increase thermostability.

[0237] Polymerase thermostability can also be influenced by the identity of other components of the ternary complex, particularly the nucleotides. As shown in FIG. 39 Panel A, wild-type Φ29 polymerase can be less stable when incubated in the presence of a hexaphosphate analog than in the presence of dATP. In contrast, a recombinant Φ29 polymerase bearing L253A, E375Y, A484E, and K512Y can be significantly more stable in the presence of the hexaphosphate analog. Similar results are seen for wild-type M2Y polymerase and recombinant M2Y polymerase with L253A, E375Y, A484E, and K512Y substitutions, as shown in FIG. 39 Panel B. These observations are consistent with the design of the recombinant polymerases; as noted above, the E375Y and K512Y substitutions strengthen interactions with the label on the analog, and the A484E substitution introduces key interactions with the polyphosphate of the analog.

[0238] Another approach for enhancing the thermostability of a protein is to introduce mutations into the protein that interact with α-helix dipoles. See, e.g., Nicholson et al. (1988) “Enhanced protein thermostability from designed mutations that interact with α-helix dipoles” Nature 336:651-656. Introduction of mutations near the N-terminus of particular α-helices in polymerases can produce recombinant polymerases that are resistant to high temperatures and/or prolonged exposure to excitation radiation, characteristics useful in applications such as DNA sequencing (e.g., single molecule sequencing), PCR analysis, and the like.

[0239] Wild-type Φ29 DNA polymerase has 13 α-helices. Mutating residues near the N-terminus of 10 of these α-helices, where the wild-type residue is mutated to an acidic amino acid (e.g., aspartic acid, glutamic acid, and the like), can result in a Φ29 polymerase with enhanced stability (e.g., thermostability and/or photostability) and improved performance in single molecule sequencing applications. Mutation(s) that result in minimal perturbation of the three-dimensional structure of the polymerase are generally preferred. Positions relative to a wild-type Φ29 DNA polymerase that can be mutated for enhanced stability include, e.g., S43, N62, P129, T159, T189, T203, S215, S252, S329, F360, and T427. Exemplary substitutions include, e.g., S43D, N62D, P129D, T159D, T189D, T203D, S215D, S252D, S329D, F360D, and T427D. Characterization of exemplary Φ29 polymerases including such mutations are provided in Table 7. Resistance to photodamage can be assessed, e.g., as described in U.S. patent application Ser. No. 12/384,110 filed Mar. 30, 2009, by Keith Bjornson et al. entitled “Enzymes Resistant to Photodamage.”

TABLE 7

| | Vₘₐₓ | Km | kcat | Specificity | | |
|---|---|---|---|---|---|---|
| Mutation | (RFU/sec) | (uM) | (bpm) | (kcat/km) | BF % | PR % |
| S43D_N62D_T368F_E375Y_K512Y | 14682.09 | 3.53 | 141.56 | 40.13 | 10.01 | 0.29 |
| N62D_T159D_T368F_E375Y_K512Y | 13408.60 | 2.21 | 129.28 | 58.59 | 9.51 | 0.24 |
| N62D_S215D_T368F_E375Y_K512Y | 15621.43 | 2.62 | 150.62 | 57.41 | 6.41 | 0.00 |

### Design and Characterization of Recombinant Polymerases

[0240] In addition to methods of using the polymerases and other compositions herein, the present invention also includes methods of making the polymerases. (Polymerases made by the methods are also a feature of the invention, and it will be evident that, although various design strategies are detailed herein, no limitation of the resulting polymerases to any particular mechanism is thereby intended.) As described, methods of making a recombinant DNA polymerase can include structurally modeling a parental polymerase, e.g., using any available crystal structure and molecular modeling software or system. Based on the modeling, one or more amino acid residue positions in the polymerase are identified as targets for mutation. For example, one or more feature affecting closed complex stability, nucleotide access to or removal from the active site (and, thereby, branching), binding of a DNA or nucleotide analog, product binding, etc. is identified. These residues can be, e.g., in the active site or a binding pocket or in a domain such as the exonuclease, TPR2 or thumb domain (or interface between domains) or proximal to such domains. The DNA polymerase is mutated to include different residues at such positions (e.g., another one of the nineteen other commonly occurring natural amino acids or a non-natural amino acid, e.g., a nonpolar and/or aliphatic residue, a polar uncharged residue, an aromatic residue, a positively charged residue, or a negatively charged residue), and then screened for an activity of interest (e.g., processivity, k_{off}, K_{d}, branching fraction, decreased rate constant, balanced rate constants, accuracy, speed, thermostability, yield, cofactor selectivity, etc.). It will be evident that catalytic and/or highly conserved residues are typically (but not necessarily) less preferred targets for mutation.

[0241] Further, as noted above, a polymerase of the invention (e.g., a Φ29-type DNA polymerase that includes E375 and K512 mutations and one or more additional mutations or a Φ29-type DNA polymerase that includes L253 and A484 mutations) can be further modified to enhance the properties of the polymerase. For example, a polymerase comprising a combination of the above mutations can be mutated at one or more additional sites to enhance a property already possessed by the polymerase or to confer a new property not provided by the existing mutations. Details correlating polymerase structure with desirable functionalities that can be added to polymerases of the invention are provided herein. Also provide below are various approaches for modifying/mutating polymerases of the invention, determining kinetic parameters or other properties of the modified polymerases (e.g., determining whether a polymerase exhibits a slow step phenotype), screening modified polymerases, and adding exogenous features to the N- and/or C-terminal regions of the polymerases.

[0242] Structure-Based Design of Recombinant Polymerases

[0243] Structural data for a polymerase can be used to conveniently identify amino acid residues as candidates for mutagenesis to create recombinant polymerases, for example, having modified active site regions and/or modified domain interfaces to reduce reaction rates, reduce branching, improve complex stability, reduce exonuclease activity, alter cofactor selectivity, increase stability, improve yield, or confer other desirable properties. For example, analysis of the three-dimensional structure of a polymerase such as Φ29 can identify residues that are in the active polymerization site of the enzyme, residues that form part of the nucleotide analog binding pocket, and/or amino acids at an interface between domains.

[0244] The three-dimensional structures of a large number of DNA polymerases have been determined by x-ray crystallography and nuclear magnetic resonance (NMR) spectroscopy, including the structures of polymerases with bound templates, nucleotides, and/or nucleotide analogs. Many such structures are freely available for download from the Protein Data Bank, at (www(dot)rcsb(dot)org/pdb. Structures, along with domain and homology information, are also freely available for search and download from the National Center for Biotechnology Information's Molecular Modeling DataBase, at www(dot)ncbi(dot)nlm(dot)nih(dot)gov/Structure/MMDB/mmdb(dot)shtml. The structures of Φ29 polymerase, Φ29 polymerase complexed with terminal protein, and Φ29 polymerase complexed with primer-template DNA in the presence and absence of a nucleoside triphosphate are available; see Kamtekar et al. (2004) “Insights into strand displacement and processivity from the crystal structure of the protein-primed DNA polymerase of bacteriophage Φ29” Mol. Cell. 16(4): 609-618), see Kamtekar et al. (2006) “The phi29 DNA polymerase:protein-primer structure suggests a model for the initiation to elongation transition” EMBO J. 25(6):1335-43, and Berman et al. (2007) “Structures of phi29 DNA polymerase complexed with substrate: The mechanism of translocation in B-family polymerases” EMBO J. 26:3494-3505, respectively. The structures of additional polymerases or complexes can be modeled, for example, based on homology of the polymerases with polymerases whose structures have already been determined. Alternatively, the structure of a given polymerase (e.g., a wild-type or modified polymerase), optionally complexed with a DNA (e.g., template and/or primer) and/or nucleotide analog, or the like, can be determined.

[0245] Techniques for crystal structure determination are well known. See, for example, McPherson (1999) Crystallization of Biological Macromolecules Cold Spring Harbor Laboratory; Bergfors (1999) Protein Crystallization International University Line; Mullin (1993) Crystallization Butterwoth-Heinemann; Stout and Jensen (1989) X-ray structure determination: a practical guide, 2nd Edition Wiley Publishers, New York; Ladd and Palmer (1993) Structure determination by X-ray crystallography, 3rd Edition Plenum Press, New York; Blundell and Johnson (1976) Protein Crystallography Academic Press, New York; Glusker and Trueblood (1985) Crystal structure analysis: A primer, 2nd Ed. Oxford University Press, New York; International Tables for Crystallography, Vol. F. Crystallography of Biological Macromolecules; McPherson (2002) Introduction to Macromolecular Crystallography Wiley-Liss; McRee and David (1999) Practical Protein Crystallography, Second Edition Academic Press; Drenth (1999) Principles of Protein X-Ray Crystallography (Springer Advanced Texts in Chemistry) Springer-Verlag; Fanchon and Hendrickson (1991) Chapter 15 of Crystallographic Computing, Volume 5 IUCr/Oxford University Press; Murthy (1996) Chapter 5 of Crystallographic Methods and Protocols Humana Press; Dauter et al. (2000) “Novel approach to phasing proteins: derivatization by short cryo-soaking with halides” Acta Cryst. D56:232-237; Dauter (2002) “New approaches to high-throughput phasing” Curr. Opin. Structural Biol. 12:674-678; Chen et al. (1991) “Crystal structure of a bovine neurophysin-II dipeptide complex at 2.8 Å determined from the single-wavelength anomalous scattering signal of an incorporated iodine atom” Proc. Natl. Acad. Sci. USA, 88:4240-4244; and Gavira et al. (2002) “Ab initio crystallographic structure determination of insulin from protein to electron density without crystal handling” Acta Cryst. D58:1147-1154.

[0246] In addition, a variety of programs to facilitate data collection, phase determination, model building and refinement, and the like are publicly available. Examples include, but are not limited to, the HKL2000 package (Otwinowski and Minor (1997) “Processing of X-ray Diffraction Data Collected in Oscillation Mode” Methods in Enzymology 276:307-326), the CCP4 package (Collaborative Computational Project (1994) “The CCP4 suite: programs for protein crystallography” Acta Crystallogr D 50:760-763), SOLVE and RESOLVE (Terwilliger and Berendzen (1999) Acta Crystallogr D 55 (Pt 4): 849-861), SHELXS and SHELXD (Schneider and Sheldrick (2002) “Substructure solution with SHELXD” Acta Crystallogr D Biol Crystallogr 58:1772-1779), Refmac5 (Murshudov et al. (1997) “Refinement of Macromolecular Structures by the Maximum-Likelihood Method” Acta Crystallogr D 53:240-255), PRODRG (van Aalten et al. (1996) “PRODRG, a program for generating molecular topologies and unique molecular descriptors from coordinates of small molecules” J Comput Aided Mol Des 10:255-262), and O (Jones et al. (1991) “Improved methods for building protein models in electron density maps and the location of errors in these models” Acta Crystallogr A 47 (Pt 2): 110-119).

[0247] Techniques for structure determination by NMR spectroscopy are similarly well described in the literature. See, e.g., Cavanagh et al. (1995) Protein NMR Spectroscopy: Principles and Practice, Academic Press; Levitt (2001) Spin Dynamics: Basics of Nuclear Magnetic Resonance, John Wiley & Sons; Evans (1995) Biomolecular NMR Spectroscopy, Oxford University Press; Wüthrich (1986) NMR of Proteins and Nucleic Acids (Baker Lecture Series), Kurt Wiley-Interscience; Neuhaus and Williamson (2000) The Nuclear Overhauser Effect in Structural and Conformational Analysis, 2nd Edition, Wiley-VCH; Macomber (1998) A Complete Introduction to Modern NMR Spectroscopy, Wiley-Interscience; Downing (2004) Protein NMR Techniques (Methods in Molecular Biology), 2nd edition, Humana Press; Clore and Gronenborn (1994) NMR of Proteins (Topics in Molecular and Structural Biology), CRC Press; Reid (1997) Protein NMR Techniques, Humana Press; Krishna and Berliner (2003) Protein NMR for the Millenium (Biological Magnetic Resonance), Kluwer Academic Publishers; Kiihne and De Groot (2001) Perspectives on Solid State NMR in Biology (Focus on Structural Biology, 1), Kluwer Academic Publishers; Jones et al. (1993) Spectroscopic Methods and Analyses: NMR, Mass Spectrometry, and Related Techniques (Methods in Molecular Biology, Vol. 17), Humana Press; Goto and Kay (2000) Curr. Opin. Struct. Biol. 10:585; Gardner (1998) Annu. Rev. Biophys. Biomol. Struct. 27:357; Wüthrich (2003) Angew. Chem. Int. Ed. 42:3340; Bax (1994) Curr. Opin. Struct. Biol. 4:738; Pervushin et al. (1997) Proc. Natl. Acad. Sci. U.S.A. 94:12366; Fiaux et al. (2002) Nature 418:207; Fernandez and Wider (2003) Curr. Opin. Struct. Biol. 13:570; Ellman et al. (1992) J. Am. Chem. Soc. 114:7959; Wider (2000) BioTechniques 29:1278-1294; Pellecchia et al. (2002) Nature Rev. Drug Discov. (2002) 1:211-219; Arora and Tamm (2001) Curr. Opin. Struct. Biol. 11:540-547; Flaux et al. (2002) Nature 418:207-211; Pellecchia et al. (2001) J. Am. Chem. Soc. 123:4633-4634; and Pervushin et al. (1997) Proc. Natl. Acad. Sci. USA 94:12366-12371.

[0248] The structure of a polymerase, or polymerase bound to a DNA or with a given nucleotide analog incorporated into the active site can, as noted, be directly determined, e.g., by x-ray crystallography or NMR spectroscopy, or the structure can be modeled based on the structure of the polymerase and/or a structure of a polymerase with a natural nucleotide bound. The active site or other relevant domain of the polymerase can be identified, for example, by homology with other polymerases, examination of polymerase-template or polymerase-nucleotide co-complexes, biochemical analysis of mutant polymerases, and/or the like. The position of a nucleotide analog (as opposed to an available nucleotide structure) in the active site can be modeled, for example, by projecting the location of non-natural features of the analog (e.g., additional phosphate or phosphonate groups in the phosphorus containing chain linked to the nucleotide, e.g., tetra, penta or hexa phosphate groups, detectable labeling groups, e.g., fluorescent dyes, or the like) based on the previously determined location of another nucleotide or nucleotide analog in the active site.

[0249] Such modeling of the nucleotide analog or template (or both) in the active site can involve simple visual inspection of a model of the polymerase, for example, using molecular graphics software such as the PyMOL viewer (open source, freely available on the World Wide Web at www(dot)pymol(dot)org), Insight II, or Discovery Studio 2.1 (commercially available from Accelrys at (www(dot)accelrys(dot)com/products/discovery-studio). Alternatively, modeling of the active site complex of the polymerase or a putative mutant polymerase, for example, can involve computer-assisted docking, molecular dynamics, free energy minimization, and/or like calculations. Such modeling techniques have been well described in the literature; see, e.g., Babine and Abdel-Meguid (eds.) (2004)Protein Crystallography in Drug Design, Wiley-VCH, Weinheim; Lyne (2002) “Structure-based virtual screening: An overview” Drug Discov. Today 7:1047-1055; Molecular Modeling for Beginners, at (www(dot)usm(dot)maine(dot)edu/˜rhodes/SPVTut/index (dot) html; and Methods for Protein Simulations and Drug Design at (www(dot)dddc(dot)ac(dot)cn/embo04; and references therein. Software to facilitate such modeling is widely available, for example, the CHARMm simulation package, available academically from Harvard University or commercially from Accelrys (at www(dot)accelrys(dot) com), the Discover simulation package (included in Insight II, supra), and Dynama (available at (www(dot)cs(dot)gsu(dot)edu/˜cscrwh/progs/progs(dot)html). See also an extensive list of modeling software at (www(dot)netsci(dot)org/Resources/Software/Modeling/MMMD/top(dot)html.

[0250] Visual inspection and/or computational analysis of a polymerase model, including optional comparison of models of the polymerase in different states, can identify relevant features of the polymerase, including, for example, residues that can be mutated to stabilize the closed complex of the polymerase, decrease branching, alter rate constants, alter cofactor selectivity, increase thermostability, increase speed, and the like. Such residues can include, for example, amino acid residues of domains that are in close proximity to one another (to stabilize inter-domain interactions), residues in an active site or binding pocket that interact with a nucleotide or analog, DNA, or product, residues that modulate how large a binding pocket for an analog is relative to the analog, etc.

[0251] As noted above, inspection of a closed Φ29-DNA complex reveals an important interface formed by the exonuclease, TPR2 and thumb domains, e.g., positions 68 to 76 and position 92 (exonuclease), positions 405 to 413 (TPR2), and positions 560 to 564 (thumb) (all numbered relative to wild-type Φ29). Mutations that stabilize this interface can increase stability of the closed complex and thus increase processivity. The parental polymerase can be mutated to introduce an interaction predicted to stabilize the closed complex. For example, one more residues that are in close proximity to each other in the closed complex can be replaced with residues having complementary features, for example, oppositely charged residues (e.g., aspartic or glutamic acid, and lysine, arginine, or histidine), residues that can hydrogen bond with each other (e.g., serine, threonine, histidine, asparagine, or glutamine), hydrophobic residues that can interact with each other, aromatic residues that can engage in π-π or edge-face stacking interactions, residues that can engage in cation-π interactions, or the like. As noted, a residue can be replaced with another naturally occurring amino acid (e.g., a nonpolar and/or aliphatic residue, a polar uncharged residue, an aromatic residue, a positively charged residue, or a negatively charged residue) or with a non-natural amino acid (e.g., having a chemical group that would interact with group(s) in the polymerase). Similarly, the parental polymerase can be mutated to remove an interaction predicted to destabilize the closed complex (two positively charged or two negatively charged residues in close proximity, residues with unfavorable van der Waals interactions, etc.). Exemplary mutations and/or mutation combinations that confer increased closed complex stability have been described above and can be found, e.g., in Table 13, FIGS. 34-35, and elsewhere herein.

[0252] In another example, polymerases can be modified to alter the branching fraction. In a preferred aspect, the modification results in a lower branching fraction relative to the parental polymerase. However, in certain single molecule sequencing approaches (e.g., where redundant signal events are utilized to determine the presence or absence of nucleotide incorporation events), it may be desirable to increase the branching fraction of polymerases of the invention. Details regarding polymerases with increased branching fractions (and uses thereof) can be found in International Publication No. WO 2010/027484 by Pranav Patel, et al. entitled “ENGINEERING POLYMERASES AND REACTION CONDITIONS FOR MODIFIED INCORPORATION PROPERTIES,” filed Sep. 4, 2009, the full disclosure of which is incorporated herein by reference in its entirety for all purposes.

[0253] The branching fraction for a nucleotide or nucleotide analog can be decreased, for example, by more tightly structuring the binding pocket for the nucleotide or analog. Residues limiting access of the nucleotide or analog to the binding pocket can be altered to decrease steric inhibition, or residues can be modified to introduce favorable interactions with complementary features of the analog.

[0254] The size or composition (e.g., position of charged or hydrophobic residues) of the binding pocket in the active site can control entry and release of the nucleotide or analog, which can affect branching fraction. A residue can, for example, be deleted or replaced with a residue having a different (smaller, larger, ionic, non-ionic, etc.) side chain. Similarly, residues that can be altered to introduce desirable interactions with the nucleotide analog can be identified to reduce branching. Such a residue can be replaced with a residue that is complementary with, e.g., a non-natural feature of the analog, for example, with a residue that can hydrogen bond to the analog (e.g., serine, threonine, histidine, asparagine, or glutamine), a hydrophobic residue that can interact with a hydrophobic group on the analog, an aromatic residue that can provide favorable hydrophobic interactions with a group on the analog (e.g., a fluorophore), an aromatic residue that can engage in a π-π or edge-face stacking interaction with an aromatic group in the analog (e.g., a base or fluorophore), a residue that can engage in a cation-π interaction with the analog, or a charged residue (e.g., aspartic or glutamic acid, or lysine, arginine, or histidine) that can electrostatically interact with an oppositely charged moiety on the analog (e.g., an additional phosphate group). Interactions with other non-natural features of analogs (e.g., a linker, e.g., between the terminal phosphate and a dye) can also be introduced. As noted, a residue can be replaced with another naturally occurring amino acid (e.g., a nonpolar and/or aliphatic residue, a polar uncharged residue, an aromatic residue, a positively charged residue, or a negatively charged residue) or with a non-natural amino acid (e.g., having a chemical group that would interact with group(s) in the analog). As just one specific example of such structure-based design of polymerases with decreased branching fraction, inspection of a model of the Φ29 polymerase reveals that a modified recombinant polymerase comprising E375Y and K512Y substitutions can exhibit an improved branching fraction phenotype. The amino acid residues 375 and 512 are located in positions predicted to bracket the exit position of the nucleotide analogs, and the aromatic rings of the tyrosines in the aforementioned modified recombinant polymerase can interact favorably with the aromatic groups of the analogs. Exemplary substitutions, deletions, insertions, and combinations thereof, that exhibit reduced branching fraction are found herein, e.g., in Tables 5, 6, 13 and 14 and FIGS. 34-35.

[0255] As another example, the parental polymerase can be mutated to decrease at least one elemental reaction rate, to produce a modified polymerase having a rate constant less than that of the parental polymerase. Several exemplary strategies follow.

[0256] Examination of a crystal structure of a D12A/D66A/T368F/E375Y/K512Y Φ29 polymerase complexed with analog A555dG6P revealed a new metal binding site (position C in FIG. 4) that is formed by the fifth (epsilon) and sixth (digamma) phosphates of the analog, residue Glu486 and other negatively charged residues in the palm domain, and three fixed water molecules. Metal (e.g., Mn²⁺) binding to the enzyme and analog can be strengthened by replacing the water molecules by either manipulation of the analog phosphate backbone or the polymerase side chains, e.g., by mutation of nearby residues A484 and/or D249, e.g., by site-saturated mutagenesis. Mutations that replace A484 and/or D249 with a larger side chain are of particular interest, such that the mutated residue(s) can replace one or more water molecules and chelate the metal ion with the fifth and sixth phosphates, slowing release of cleaved products. Exemplary mutations include A484E, A484Y, A484H, A484D, D249E, D249Y, D249H, and combinations thereof (e.g., D249E with one of the mutations at position 484).

[0257] Comparison of two crystal structures of an A484E Φ29 mutant polymerase with increased phosphate binding affinity revealed that the additional metal ion can occupy two different positions (C and D). Computer modeling indicates that a four metal ion coordination network, in which both positions C and D are occupied by a metal ion, can be designed to stabilize binding of analogs with six or more phosphates (FIG. 20). Mutation of Ala484 to Glu helps free E486, which originally bound metal C, to bind the additional metal ion D. An S487E or S487D mutation can also enhance coordination of the additional metal ion. A modified polymerase including A484E and S487E mutations (in a E375Y/K512Y/T368F background) exhibits a lower branching fraction and enhanced analog binding, and also shows slower release of polyphosphate product as indicated by a Cbz pyrophosphate inhibition assay (e.g., as described hereinbelow). Similarly, an S459D or S459E mutation, for example, in combination with A484E, can assist in coordination of the fourth metal ion (e.g., Mn²⁺). A V247E mutation is optionally also included to increase the negative charge characteristics of the metal binding site's environment, although this residue does not directly assist in coordinating metal.

[0258] Another strategy for slowing reaction rates involves stabilizing a closed conformation of a ternary complex comprising the polymerase, a DNA, and a nucleotide or nucleotide analog, for example, to slow product release and release of the analog and decrease branching fraction. The parental polymerase can be mutated at one or more positions to introduce at least one intramolecular interaction predicted to stabilize the closed conformation of the ternary complex or to remove at least one intramolecular interaction predicted to destabilize the closed conformation. For example, one or more residues that are in close proximity to each other in the closed conformation of the ternary complex can be replaced with residues having complementary features, for example, oppositely charged residues (e.g., aspartic or glutamic acid, and lysine, arginine, or histidine), residues that can hydrogen bond with each other (e.g., serine, threonine, histidine, asparagine, or glutamine), hydrophobic residues that can interact with each other, aromatic residues that can engage in π-π or edge-face stacking interactions, residues that can engage in cation-π interactions, or the like, e.g., to stabilize the closed conformation of the fingers, the finger-exonuclease domain interface, finger-palm interactions, etc., including natural and non-natural residues as noted herein. Residues identified as targets for stabilizing the closed conformation include, e.g., 179, 198, 211, 255, 259, 360, 363, 365, 370, 372, 378, 381, 383, 387, 389, 393, 433, 478, and 480. Exemplary substitutions include 179Y, 179H, 179A, 179W, 198W, 198A, 198H, 211W, 211A, 211H, 255W, 255A, 255H, 259W, 259A, 259H, 360W, 360A, 360H, 363W, 363A, 363H, 365N, 365Q, 370W, 370A, 370H, 372Q, 372L, 372Y, 372H, 372V, 372I, 372F, 372N, 378A, 378H, 378W, 378Y, 381A, 381H, 381W, 383N, 383A, 383L, 383H, 383R, 387L, 387F, 387V, 389A, 389W, 389H, 393A, 393W, 393H, 433A, 433W, 433H, 478Y, 478L, 480H, and 480F, as well as combinations thereof such as T372L/K478Y, T372Y/K478Y, T372Y/K478L, I179A/L381A, I179A/I378A/L381A, I370A/I378A, I179A/I370A/I378A/L381A, I179H/I378H, I179W/I378W, and I179Y/I378Y. Additional exemplary substitutions, deletions, insertions, and combinations thereof, are found in Table 13 and FIG. 34-35. As for the other embodiments herein, site-saturated mutagenesis to all possible residues can also be performed.

[0259] For example, the closed conformation can be stabilized by altering interactions between the finger and palm domains. Comparison between a previous crystal structure of a Φ29 DNA polymerase-DNA complex (Berman et al. (2007) EMBO J. 26:3494-3505) and a crystal structure of a D12A/D66A/E375Y/K512Y/T368F Φ29 polymerase in complex with DNA and the analog A555-O-dG6P determined in-house demonstrates that the finger domains move toward the binding pocket when the polymerase binds an incoming nucleotide and changes from the open to the closed conformation. In the open conformation, the finger domains show close contacts with the exonuclease domain. In contrast, in the closed conformation, the finger domain moves toward the binding pocket and makes more contacts with the palm domain. The crystal structure of the modified polymerase shows that the T368F substitution (finger domain) increases hydrophobic interaction with L480 (palm domain), helping stabilize the closed conformation. Increasing hydrophobic interactions or adding a salt bridge between T372 in the finger domain and K478 in the palm domain, for example, can assist in maintaining the closed conformation. A view of Φ29 centered on residue T372 is shown in FIG. 26 Panel C. FIG. 26 Panels A and B compare the open and closed conformation of regions around T372. Mutant polymerases including T372Q, T372L, or T372Y/K478Y substitutions show promising results in transient kinetic assays (Table 8).

[0260] As another example, bulky amino acids can be placed in the finger domain on the back side of the binding pocket or in the exonuclease domain to keep the finger and exonuclease domains apart, stabilizing the closed conformation (FIG. 27). Examples include I378W and I370H (finger domain) and I179W (exonuclease domain). Modified polymerases including these substitutions have a lower branching fraction than does the parental enzyme (where the parental enzyme is N62D/E375Y/K512Y/T368F); see Table 8. Residues 179 and 378 can be varied simultaneously, e.g., via combinatorial mutagenesis. As noted elsewhere herein, promising mutations at various positions can be combined.

TABLE 8
Characterization of modified polymerases.

| | Vmax | | kcat | |
|---|---|---|---|---|
| Mutations | (RFU/sec) | Km (μM) | (bpm) | BF %^{a} |
| N62D_T368F_T372Q_E375Y_K512Y | 16017.80 | 2.19 | 154.44 | 6.63 |
| N62D_T368F_T372L_E375Y_K512Y | 17835.08 | 2.66 | 171.96 | 8.04 |
| N62D_T368F_T372Y_E375Y_K478Y_K512Y | 12347.13 | 3.14 | 119.05 | 7.70 |
| N62D_T368F_T372L_E375Y_K478Y_K512Y | 12423.08 | 2.79 | 119.78 | 8.12 |
| N62D_L253A_T368F_E375Y_K512Y | 14874.50 | 2.23 | 143.42 | 9.79 |
| N62D_I179W_T368F_E375Y_K512Y | 5269.00 | 0.62 | 50.80 | 9.05 |
| N62D_T368F_I370H_E375Y_K512Y | 14312.11 | 1.71 | 137.99 | 7.84 |
| N62D_T368F_E375Y_I378W_K512Y | 12976.19 | 1.96 | 125.11 | 6.50 |

^{a}BF: branching fraction

[0261] Increasing interaction between the polymerase and the base of an incoming nucleotide or nucleotide analog can also slow a reaction step, e.g., translocation. Residue 387 can be mutated to a hydrophobic or aromatic residue to increase hydrophobic interactions with the base and/or stack with it. Exemplary mutations include N387L, N387F, and N387V. Site-saturated mutagenesis to all possible residues can also be performed.

[0262] Similarly, the polymerase can be mutated to increase interaction between the polymerase and a label on a nucleotide analog, e.g., a terminal fluorophore. As for the embodiments above, one or more residues can be mutated to introduce a favorable interaction between the polymerase and the label or to remove an unfavorable interaction. As one example, residue 514 can be mutated to another hydrophobic residue or to an aromatic residue to improve interaction with a terminal fluorophore, particularly on a hexaphosphate analog. Exemplary mutations include V514Y and V514F.

[0263] As another example, the flexibility of either or both of two surface loops on the polymerase, residues 372-397 and 507-514, can be increased by insertion of one or more amino acid residues (e.g., 1-7 residues, e.g., glycine) within either or both loops to facilitate interaction of other regions with the analog (e.g., of residue 512 with a terminal fluorophore, in a mutant polymerase that also includes K512Y). For example, a glycine residue can be introduced after residue 374, 375, 511, and/or 512 (designated as 374.1G, 375.1G, etc.).

[0264] A crystal structure of a D12A/D66A/E375Y/K512Y/T368F Φ29 polymerase with DNA and the hexaphosphate analog A555-O-dG6P determined in-house demonstrates that the aromatic rings of E375Y and K512Y are proximal to each other, trapping the dye moiety of the analog (FIG. 28). Examination of the electron density map shows that E375Y has a fixed conformation but K512Y shows greater flexibility. Insertion of one or more amino acids into the 507-514 loop can give greater flexibility to the loop, permitting K512Y (or similar substitutions such as K512F) to make stronger hydrophobic interactions with the dye moiety. An exemplary mutant with two glycines inserted around K512Y has a lower Kₘ and high specificity (Table 9). Additional exemplary mutants include 511G(Xn)512Y(Xn), where Xn represents insertion of any number of any amino acids, insertion of a glycine and a serine after each of residues 511 and 512, or insertion of a copy of residues 508-511 after 511 (duplicating the loop). Such mutations can, e.g., stabilize the closed conformation, slow product release, and/or decrease branching fraction.

TABLE 9
Characterization of loop insertion mutant.

| | Vₘₐₓ | | | Specificity | |
|---|---|---|---|---|---|
| Mutation | (RFU/sec) | Km (μM) | kcat (bpm) | (kcat/Km) | BF %^{a} |
| N62D_T368F_E375Y_511.1Gins_K512Y_512.1Gins | 12220.79 | 1.37 | 117.83 | 85.80 | 12.22 |
| N62D_T368F_E375Y_K512Y | 12187.11 | 2.21 | 117.50 | 53.15 | 9.19 |

^{a}BF: branching fraction

[0265] For single molecule sequencing with phosphate-labeled analogs, the timing of polyphosphate release after nucleotidyl transfer can play an important role in detection of the event, as described above. The release of pyrophosphate is coupled with the movement of the DNA polymerase and DNA translocation (Steitz (2004) “The structural basis of the transition from initiation to elongation phases of transcription, as well as translocation and strand separation, by T7 RNA polymerase” Curr Opin Struct Biol 14(1):4-9, Steitz (2006) “Visualizing polynucleotide polymerase machines at work” EMBO J 25(15):3458-68, and Steitz and Yin (2004) “Accuracy, lesion bypass, strand displacement and translocation by DNA polymerases” Philos Trans R Soc Lond B Biol Sci 359(1441):17-23). Where translocation follows polyphosphate release, slowing translocation will increase interpulse distance and decrease the chance of merging two consecutive pulses in SMS as described herein. Where polyphosphate release is concurrent with translocation, slowing translocation will not change interpulse distance but rather pulse width, which can improve detection of pulses as described herein.

[0266] Examination of an in-house crystal structure of Φ29 polymerase revealed two groups of residues within 4 Å of the DNA backbone and directly or indirectly interacting with the DNA. Residues in group one have non-positive charge: Y101, M188, T189, Q303, N313, S395, F414, Q497, Y500, A531, G532, T534, P558, D570, F572, and 1574 (FIG. 7). Residues in group two have positive charge: K64, K305, K392, K402, K422, R496, K529, K538, K555, and K575 (FIG. 8). These two groups of residues exclude residues close to the enzyme's incoming deoxynucleotide binding site (active site).

[0267] Residues from either or both groups can be mutated to strengthen or weaken interactions with the DNA and thus affect translocation and/or polyphosphate release. For example, increasing DNA binding can slow translocation and pyrophosphate release, and can also increase processivity. Typically, positively charged residues are favored for DNA binding due to the negatively charged DNA backbone. Thus, one or more residue from group one can be mutated to a positively charged residue, e.g., lysine, arginine, or histidine, to increase interaction. (Site-saturated mutagenesis to all possible residues can also be performed.) As for other strategies herein, promising mutations can be combined for greater enhancement of effect on rate. Since the residues of group ones are spread out in the region along the DNA backbone (except for the active site), mutation effect is generally addable. Virtual mutation of all residues in group one simultaneously to positively charged lysine shows a significant enhancement of electrostatic interactions between the polymerase and the DNA (FIG. 9 Panels A and B). Similarly, one or more residues from group two can be mutated, e.g., to any of the other amino acids, e.g., by site-saturated mutagenesis. Virtual mutation of all residues in group two simultaneously to uncharged alanine shows a significant decrease in electrostatic interactions between the polymerase and DNA (FIG. 10 Panels A and B). The mutation effect for group two is also generally addable. Combinations of mutations from groups one and two are also evaluated. Residues around the active site can also control translocation, for example, tyrosines 254 and 390 and asparagine 387. Mutation of these residues can also alter DNA translocation.

[0268] Exemplary mutations include Y101K, M188K, T189K, Q303K, N313K, S395K, F414K, Q497K, Y500K, A531K G532K, T534K, P558K, D570K, F572K, 1574K, K64A, K305A, K392A, K402A, K422A, R496A, K529A, K538A, K555A, and K575A. Initial experiments were performed with modified polymerases comprising the exemplary substitutions in a E375Y/K512Y/T368F Φ29 polymerase background. The initial experiments show that the polymerases including M188K, S395K, Q497K, T534K, or K575A have good specificity and branching fraction. The modified polymerases including Q303K, N313K, F414K, D570K, K392A, K402A or K422A have improved specificity, and the polymerase including K555A has improved branching fraction. A DNA dissociation assay shows that modified polymerases including Q303K, N313K, Q497K, or D570K have improved processivity, and a Cbz assay shows that the polymerase including F572K has features characteristic of slow product release. In a single molecule sequencing assay, a Q497K/N62D/E375Y/K512Y/T368F/A484E modified Φ29 polymerase demonstrates a longer read length (indicating improved processivity consistent with the results of the DNA dissociation assay) and a faster on rate (kₒₙ) compared to the control enzyme (N62D/E375Y/K512Y/T368F/A484E). Additional exemplary substitutions, deletions, insertions, and combinations thereof are found herein, e.g., in Table 13 and FIGS. 34-35.

[0269] As another strategy, one or more residues in the polymerase that are proximal to a phosphate on a bound nucleotide or nucleotide analog can be mutated to weaken or strengthen interaction with the phosphate (e.g., any phosphate in a tri-, tetra-, penta-, hexa-, or hepta-phosphate analog). For example, a positively charged residue that interacts with a phosphate can be mutated to an uncharged or even a negatively charged residue to weaken interactions with the phosphate, or an uncharged or negatively charged residue can be mutated to a polar uncharged residue or a positively charged residue to strengthen interaction. Such mutations can, e.g., affect release of a polyphosphate product (e.g., pyrophosphate or a longer polyphosphate, e.g., with attached label).

[0270] A crystal structure of a Φ29 polymerase with a bound hexaphosphate analog determined in-house reveals that the hexaphosphate analog interacts closely with the fingers. Several positively charged residues on the finger domain (Lys383, Lys379, Lys371, and Lys361) form electrostatic interactions to the negatively charged hexaphosphate group on the analog. In addition, careful examination of the structure revealed that residue Gln380 points toward the phosphate groups (FIG. 29). Mutation of Gln380, e.g., to a charged residue, can therefore affect (e.g., increase) electrostatic interactions with the phosphate group. Exemplary mutations include Q380K, Q380R, Q380H, Q380D, and Q380E. Polymerases with a Q380K, Q380R, or Q380D substitution (in a E375Y, K512Y and T368F background) demonstrate a lower branching fraction and enhanced analog binding, and they also show slower release of polyphosphate product in a Cbz leaving pyrophosphate inhibition assay (e.g., as described hereinbelow). Without limitation to any particular mechanism, Q380K and Q380R are thought to introduce a positive charge interacting with the negatively charged phosphate groups, while Q380D introduces a negative charge that can build a metal ion coordination structure (or salt bridge, negatively charged Q380D-positively charged metal ion-negatively charged phosphate), to strengthen analog binding and slow polyphosphate release. As noted above, the hexaphosphate group on the analog also interacts with negatively charged residues in the palm domain via metal ion coordination. The Q380 substitutions are optionally used in combination with other mutations, e.g., mutations that affect metal ion coordination (e.g., A484E, S487E, etc.).

[0271] In a related approach, residues observed to coordinate one or more additional metal ions and thus indirectly contribute to interaction with the phosphate tail of the nucleotide analog are altered to interact directly with the phosphate groups. As described above, an additional third metal ion that coordinates with the phosphate tail and the polymerase has been observed in in-house crystal structures (e.g., FIG. 22), and a mutant polymerase including an A484E substitution (expected to strengthen metal coordination) displays two slow step behavior. As shown in FIG. 23 Panels A-D, three major different phosphate backbone conformations have been observed for hexaphosphate analogs in various in-house crystal structures of Φ29 polymerase complexes with DNA and analog. One is an active conformation and two are inactive conformations based on phosphate backbone orientation. The third metal is observed in structures displaying inactive conformations. In addition, in the crystal structure of a Φ29 polymerase having D12A, D66A, E375Y, K512Y, T368F, and A484E substitutions with the hexaphosphate analog A555-O-dG6P, two alternative phosphate backbone conformations with 50% occupancy were observed (FIG. 24). In this structure, the side chain of A484E directly coordinates the third metal ion without a bridging water molecule, as expected. However, the metal coordination is not ideal, and accordingly the third metal only shows 50% occupancy in the crystal structure. Also, two alternative structures for D249 have been observed in active and inactive crystal structures.

[0272] These observations indicate that removing or weakening the third metal site may be of interest, e.g., where maintenance of the active conformation of the phosphate backbone is desirable. Coordination of the third metal can be weakened, for example, by mutation of A484 and/or E486 (which also coordinates metal C), for example, to neutral amino acids (e.g., E486A). Similarly, A484 and/or E486 can be changed to a basic amino acid, destroying coordination of the third metal but maintaining interaction with the phosphate backbone even in the absence of the metal. Examples include, but are not limited to, A484K, A484R, A484M, E486K, E486R, E486M, and combinations thereof. Modified polymerases including A484R or A484K (in a E375Y/K512Y/T368F background) exhibit a high kₒₙ and two slow step behavior. Additional positive charge around the location of the sixth phosphate in analogs with six or more phosphates can also be achieved, for example, by altering E515 and/or P477 (e.g., E515K, E515R, P477K, P477R, and combinations thereof), optionally in combination with mutation of residues 484 and/or 486. Additional exemplary substitutions, deletions, insertions, and combinations thereof are found in Table 13 and FIG. 34.

[0273] Mutation of residues proximal to the polyphosphate tail of a bound nucleotide or analog can affect isomerization of the polyphosphate tail, slowing nucleotide isomerization and/or polyphosphate product release. This strategy can be particularly useful for nucleotide analogs with four or more phosphate groups. During the process of DNA polymerization, a nucleotide isomerization step before the chemical reaction step has been observed and considered to be a relatively slow step compared to the initial nucleotide binding event (Dahlberg and Benkovic (1991) “Kinetic mechanism of DNA polymerase I (Klenow fragment): Identification of a second conformational change and evaluation of the internal equilibrium constant” Biochemistry 30(20):4835-43, Patel et al. (1991) “Pre-steady-state kinetic analysis of processive DNA replication including complete characterization of an exonuclease-deficient mutant” Biochemistry 30(2):511-25, Hsieh et al. (1993) “Kinetic mechanism of the DNA-dependent DNA polymerase activity of human immunodeficiency virus reverse transcriptase” J. Biol. Chem. 268(33):24607-13, Washington et al. (2001) “Yeast DNA polymerase eta utilizes an induced-fit mechanism of nucleotide incorporation” Cell 107(7):917-27, and Anand and Patel (2006) “Transient state kinetics of transcription elongation by T7 RNA polymerase” J. Biol. Chem. 281(47):35677-85).

[0274] A group of DNA polymerase ternary complexes with the nucleoside polyphosphate tail in different conformations were determined by x-ray crystallography (Vaisman et al. (2005) “Fidelity of Dpo4: Effect of metal ions, nucleotide selection and pyrophosphorolysis” EMBO J 24(17):2957-67, and in-house crystal structures of Φ29 complexes). Crystal structures of Φ29 polymerase with a hexaphosphate analog determined in house reveal both active (FIG. 5 Panel A) and inactive (FIG. 5 Panel B) conformations of the polyphosphate tail on the incoming nucleotide analog. Comparison of the two ternary structures revealed that binding of the nucleotide analog is tighter in the active conformation than in the inactive conformation (FIG. 5 Panels A and B). The loose binding of the inactive hexaphosphate tail provides necessary space for sampling multiple inactive conformations and finally achieving the active conformation which leads to the chemical reaction. Increasing the multiplicity of the inactive conformations or stabilizing a certain inactive conformation can extend the isomerization time of the analog before the chemical reaction occurs. Mutants that do so without increasing branching fraction are preferred.

[0275] Superposition of the active and inactive conformation structures revealed two residues, Lys383 and Asp458, on the two sides of the beta phosphate that provide limitation between the active and inactive conformational change. These two residues act as a “clamp” which introduces possible steric hindrance for the polyphosphate isomerization (FIG. 6). Decreasing the residue size at either or both of these two positions (especially position 383) can decrease the branching fraction. Mutating these residues can also increase the multiplicity of the inactive conformation, extending the isomerization time. Two other residues, Lys371 and Lys379, also interact with the polyphosphate tail. Mutation of these residues (e.g., to another positively charged residue or an uncharged residue) can also affect isomerization control. Note that Asp458 is in the polymerase active site, and mutating this residue may thus have undesirable effects on enzyme activity. The other three lysines provide a positively charged binding environment for the negatively charged polyphosphate tail. Severely changing the polarity of this binding pocket may disrupt accommodation of the analog, so mutation to other positively charged residues or to uncharged residues is typically preferred.

[0276] Residues that can be mutated to affect interactions with phosphates include, e.g., 251, 371, 379, 380, 383, 458, 484, and 486. Exemplary substitutions include 251E, 251K, 251R, 251H, 251Q, 251D, 371A, 371W, 371L, 371H, 371R, 371N, 371Q, 379L, 379H, 379R, 379N, 379Q, 380R, 380H, 380K, 383L, 383H, 383R, 383Q, 383N, 383T, 383S, 383A, 484K, 484R, 486A, and 486D. Additional exemplary substitutions, deletions, insertions, and combinations thereof, are found in Table 13 and FIG. 34. Site saturated mutagenesis, in which each of the other nineteen amino acids is substituted for the residue occupying a given position can also be performed at one or more of these positions, e.g., 383 or the others listed (and/or at essentially any of the positions noted elsewhere herein).

[0277] In a related strategy, the polymerase can be modeled with a polyphosphate in the binding pocket, e.g., through crystallographic study or molecular modeling. The polymerase can be mutated to alter isomerization of the polyphosphate product and thus slow its release. The length and/or chemical structure of the tail can also be modified to alter isomerization. Altering isomerization of the polyphosphate product can avoid inadvertently increasing branching fraction. Similarly, the polymerase can be mutated to strengthen binding to the polyphosphate product but not to the phosphate groups of the incoming nucleotide, which again can slow product release without reducing specificity and increasing branching fraction.

[0278] As one example of such design, molecular modeling was initiated using two in-house crystal structures of the ternary complex of Φ29 polymerase, representing the closed conformation and having a different conformation of the phosphate groups on the hexaphosphate analog, and a crystal structure of a binary complex (obtained from the Protein Data Bank, PDB ID 2PZS), representing the open conformation. To model the leaving penta-pyrophosphate analog in the closed conformation, the first phosphodiester bond between P-alpha and P-beta was broken. The deoxynucleotide in the analog was modeled to be covalently linked to the primer deoxynucleoside. The leaving penta-pyrophosphate was hydrolyzed and left in the same position to yield the starting point of the simulation. For modeling of the polymerase in the open conformation with the leaving penta-pyrophosphate, a ternary complex was superimposed on the binary complex before the operation of the chemical reaction.

[0279] Molecular dynamics simulations were performed on the three models. After the simulation, the penta-pyrophosphate reoriented to different locations in all three cases. Residues interacting with the penta-pyrophosphate in all three resulting models were selected. In all three cases, N251 and P477 interact with the leaving penta pyrophosphate (FIGS. 30-32). In addition, P477 does not have any interactions with the phosphate groups in the analog-bound closed conformation before the chemical reaction and N251 has only weak interactions with the phosphate groups in one closed conformation model before the reaction, making these residues highly suitable for mutation to affect polyphosphate release without reducing specificity or increasing branching fraction. Exemplary substitutions include N251K, N251Q, N251D, P477K, P477Q, P477D, P477E, P477R, and P477H. A modified polymerase including P477D displays a significantly lower branching fraction than the parental polymerase (N62D/E375Y/K512Y/T368F), while modified polymerases including N251K, N251Q, P477K, or P477Q have better specificity and a reasonable branching fraction. Additional exemplary substitutions, deletions, insertions, and combinations thereof are found in Table 13 and FIG. 34.

[0280] Recombinant polymerases with increased speed and readlength are desirable for applications such as sequencing. One strategy for producing such polymerases is illustrated in FIG. 41. Panel A illustrates the electrostatic surface of Φ29 polymerase at the analog binding pocket. Panel B shows the location of residues I504, E508, D510, L513, and D523. Mutation of one or more of these residues so as to increase the net positive charge of the polymerase in this region can increase polymerase speed, for example, by increasing the kₒₙ for negatively charged nucleotide analogs. Thus, mutation of one or more of these residues to a positively charged residue (e.g., arginine, lysine, or histidine) and/or replacement of one or more negatively charged residue with an uncharged residue (e.g., introduction of a D510Y substitution) can increase polymerase speed.

[0281] For example, a D510K substitution can increase readlength and speed in single molecule sequencing reactions by narrowing interpulse distances. However, this mutation also can decrease protein yield significantly. See, e.g., FIG. 40. As another example, an E508K or E508R substitution can increase speed by decreasing interpulse distance (but can increase undesirable pausing). Combinations of D510K and E508K or E508R can exhibit additive effects in the reduction of interpulse distances.

[0282] As described above, an L253A substitution can be used to increase Mg⁺⁺ tolerance. However, packing of the residues surrounding the alanine in an in-house crystal structure of a recombinant polymerase comprising an L253A substitution does not appear to be optimal, as illustrated in FIG. 42 Panels A and B. Mutation of the surrounding residues can improve packing in this region. For example, V250 can be mutated. Exemplary substitutions include V250I, V250Q, V250L, V250M, V250C, V250F, V250N, V250R, V250T, and V250Y. A V250I substitution, for example, can improve protein yield approximately 1.6 fold, and can also increase speed by narrowing pulse width and reduce pausing.

[0283] Mutations that increase thermostability and/or improve yield are desirable, for example, as described above for combination with mutations that confer other desirable properties but that decrease stability and/or yield. In one exemplary strategy for improving yield and stability, position E239 of Φ29 was identified as a target for mutation. As shown in FIG. 36 Panels A and B, E239 is located in a type II turn. Across a variety of proteins, however, statistically glycine is preferred at this position in type II turns. An E239G substitution was introduced into Φ29 polymerase accordingly. The E239G substitution can increase protein yield approximately twofold in a diverse set of variants. Moreover, since residue 239 is distal to the analog and nucleic acid binding sites, the E239G substitution does not affect sequencing kinetics.

[0284] Consensus-Based Design of Recombinant Polymerases

[0285] Amino acid sequence data, e.g., for a family of polymerases, can also be used to identify particular residues as candidates for mutagenesis. For example, as shown in FIG. 37 Panel A, alignment of the sequences of several polymerases revealed that Φ29-type DNA polymerases have a lysine at position 224 more often than a tyrosine.

[0286] A Y224K substitution was introduced into Φ29 accordingly. This substitution can increase thermostability, e.g., increasing unfolding temperature by about one degree when introduced into an N62D Φ29 backbone. The substitution can also increase protein yield in high throughput purification procedures by approximately fourfold.

[0287] Comparison of the crystal structures of Φ29 polymerases with and without the Y224K substitution indicated that residue E221 moves to form a hydrogen bond with K224 in the Y224K variant structure (FIG. 37 Panels B and C), suggesting a structural basis for the observed increase in stability.

[0288] Combining Mutations

[0289] As noted repeatedly, the various mutations described herein can be combined in recombinant polymerases of the invention. Combination of mutations can be random, or more desirably, guided by the properties of the particular mutations and the characteristics desired for the resulting polymerase. Additional mutations can also be introduced into a polymerase to compensate for deleterious effects of otherwise desirable mutations.

[0290] A large number of exemplary mutations and the properties they confer have been described herein, and it will be evident that these mutations can be favorably combined in many different combinations. Exemplary combinations have also been provided herein, e.g., in Tables 1-9, 13, and 16 and FIGS. 34 and 35, and an example of strategies by which additional favorable combinations are readily derived follows. For the sake of simplicity, exemplary combinations using only a few mutations are discussed, but it will be evident that any of the mutations described herein can be employed in such strategies to produce polymerases with desirable properties.

[0291] For example, where a recombinant polymerase is desired to incorporate phosphate-labeled phosphate analogs in a Mg⁺⁺-containing single molecule sequencing reaction, one or more substitutions that enhance analog binding (e.g., E375Y, K512Y, and/or A484E) and one or more substitutions that alter metal cofactor usage (e.g., L253A) can be incorporated. Exemplary combinations thus include L253A and A484E; L253A, E375Y, and K512Y; and L253A, E375Y, A484E, and K512Y. Polymerase speed can be enhanced by inclusion of substitutions such as D510K and/or V250I , providing combinations such as L253A, A484E, and D510K; Y148I , L253A, and A484E; L253A, E375Y, A484E, D510K, and K512Y; Y148I , L253A, E375Y, A484E, D510K, and K512Y; and Y148I , L253A, E375Y, A484E, and K512Y. Stability and/or yield can be increased by inclusion of substitutions such as E239G, V250I , and/or Y224K, producing combinations such as E239G, L253A, A484E, and D510K; E239G, L253A, E375Y, A484E, D510K, and K512Y; and Y224K, E239G, L253A, E375Y, A484E, D510K, and K512Y. Accuracy can be enhanced by inclusion of substitutions such as E515Q and/or Y148I (which also decreases exonuclease activity), providing combinations such as Y148I , Y224K, E239G, V250I , L253A, E375Y, A484E, D510K, and K512Y; and Y148I , Y224K, E239G, V250I , L253A, E375Y, A484E, D510K, K512Y, and E515Q. Many other such recombinant polymerases, including these mutations and/or those described elsewhere herein, will be readily apparent and are features of the invention.

[0292] Mutating Polymerases

[0293] Various types of mutagenesis are optionally used in the present invention, e.g., to modify polymerases to produce variants, e.g., in accordance with polymerase models and model predictions as discussed above, or using random or semi-random mutational approaches. In general, any available mutagenesis procedure can be used for making polymerase mutants. Such mutagenesis procedures optionally include selection of mutant nucleic acids and polypeptides for one or more activity of interest (e.g., reduced reaction rates, decreased exonuclease activity, increased complex stability, decreased branching fraction, altered metal cofactor selectivity, improved processivity, increased thermostability, increased yield, increased accuracy, and/or improved k_{off}, Kₘ, Vₘₐₓ, K_{cat} etc., e.g., for a given nucleotide analog). Procedures that can be used include, but are not limited to: site-directed point mutagenesis, random point mutagenesis, in vitro or in vivo homologous recombination (DNA shuffling and combinatorial overlap PCR), mutagenesis using uracil containing templates, oligonucleotide-directed mutagenesis, phosphorothioate-modified DNA mutagenesis, mutagenesis using gapped duplex DNA, point mismatch repair, mutagenesis using repair-deficient host strains, restriction-selection and restriction-purification, deletion mutagenesis, mutagenesis by total gene synthesis, degenerate PCR, double-strand break repair, and many others known to persons of skill. The starting polymerase for mutation can be any of those noted herein, including available polymerase mutants such as those identified e.g., in WO 2007/076057 POLYMERASES FOR NUCLEOTIDE ANALOGUE INCORPORATION by Hanzel et al.; WO 2008/051530 POLYMERASE ENZYMES AND REAGENTS FOR ENHANCED NUCLEIC ACID SEQUENCING; Hanzel et al. WO 2007/075987 ACTIVE SURFACE COUPLED POLYMERASES; and Hanzel et al. WO 2007/076057 PROTEIN ENGINEERING STRATEGIES TO OPTIMIZE ACTIVITY OF SURFACE ATTACHED PROTEINS.

[0294] Optionally, mutagenesis can be guided by known information from a naturally occurring polymerase molecule, or of a known altered or mutated polymerase (e.g., using an existing mutant polymerase as noted in the preceding references), e.g., sequence, sequence comparisons, physical properties, crystal structure and/or the like as discussed above. However, in another class of embodiments, modification can be essentially random (e.g., as in classical or “family” DNA shuffling, see, e.g., Crameri et al. (1998) “DNA shuffling of a family of genes from diverse species accelerates directed evolution” Nature 391:288-291).

[0295] Additional information on mutation formats is found in: Sambrook et al., Molecular Cloning—A Laboratory Manual (3rd Ed.), Vol. 1-3, Cold Spring Harbor Laboratory, Cold Spring Harbor, N.Y., 2000 (“Sambrook”); Current Protocols in Molecular Biology, F. M. Ausubel et al., eds., Current Protocols, a joint venture between Greene Publishing Associates, Inc. and John Wiley & Sons, Inc., (supplemented through 2011) (“Ausubel”)) and PCR Protocols A Guide to Methods and Applications (Innis et al. eds) Academic Press Inc. San Diego, Calif. (1990) (“Innis”). The following publications and references cited within provide additional detail on mutation formats: Arnold, Protein engineering for unusual environments, Current Opinion in Biotechnology 4:450-455 (1993); Bass et al., Mutant Trp repressors with new DNA-binding specificities, Science 242:240-245 (1988); Bordo and Argos (1991) Suggestions for “Safe” Residue Substitutions in Site-directed Mutagenesis 217:721-729; Botstein & Shortle, Strategies and applications of in vitro mutagenesis, Science 229:1193-1201 (1985); Carter et al., Improved oligonucleotide site-directed mutagenesis using M13 vectors, Nucl. Acids Res. 13: 4431-4443 (1985); Carter, Site-directed mutagenesis, Biochem. J. 237:1-7 (1986); Carter, Improved oligonucleotide-directed mutagenesis using M13 vectors, Methods in Enzymol. 154: 382-403 (1987); Dale et al., Oligonucleotide-directed random mutagenesis using the phosphorothioate method, Methods Mol. Biol. 57:369-374 (1996); Eghtedarzadeh & Henikoff, Use of oligonucleotides to generate large deletions, Nucl. Acids Res. 14: 5115 (1986); Fritz et al., Oligonucleotide-directed construction of mutations: a gapped duplex DNA procedure without enzymatic reactions in vitro, Nucl. Acids Res. 16: 6987-6999 (1988); Grundström et al., Oligonucleotide-directed mutagenesis by microscale ‘shot-gun’ gene synthesis, Nucl. Acids Res. 13: 3305-3316 (1985); Hayes (2002) Combining Computational and Experimental Screening for rapid Optimization of Protein Properties PNAS 99(25) 15926-15931; Kunkel, The efficiency of oligonucleotide directed mutagenesis, in Nucleic Acids & Molecular Biology (Eckstein, F. and Lilley, D. M. J. eds., Springer Verlag, Berlin)) (1987); Kunkel, Rapid and efficient site-specific mutagenesis without phenotypic selection, Proc. Natl. Acad. Sci. USA 82:488-492 (1985); Kunkel et al., Rapid and efficient site-specific mutagenesis without phenotypic selection, Methods in Enzymol. 154, 367-382 (1987); Kramer et al., The gapped duplex DNA approach to oligonucleotide-directed mutation construction, Nucl. Acids Res. 12: 9441-9456 (1984); Kramer & Fritz Oligonucleotide-directed construction of mutations via gapped duplex DNA, Methods in Enzymol. 154:350-367 (1987); Kramer et al., Point Mismatch Repair, Cell 38:879-887 (1984); Kramer et al., Improved enzymatic in vitro reactions in the gapped duplex DNA approach to oligonucleotide-directed construction of mutations, Nucl. Acids Res. 16: 7207 (1988); Ling et al., Approaches to DNA mutagenesis: an overview, Anal Biochem. 254(2): 157-178 (1997); Lorimer and Pastan Nucleic Acids Res. 23, 3067-8 (1995); Mandecki, Oligonucleotide-directed double-strand break repair in plasmids of Escherichia coli: a method for site-specific mutagenesis, Proc. Natl. Acad. Sci. USA, 83:7177-7181(1986); Nakamaye & Eckstein, Inhibition of restriction endonuclease Nci I cleavage by phosphorothioate groups and its application to oligonucleotide-directed mutagenesis, Nucl. Acids Res. 14: 9679-9698 (1986); Nambiar et al., Total synthesis and cloning of a gene coding for the ribonuclease S protein, Science 223: 1299-1301(1984); Sakamar and Khorana, Total synthesis and expression of a gene for the a-subunit of bovine rod outer segment guanine nucleotide-binding protein (transducin), Nucl. Acids Res. 14: 6361-6372 (1988); Sayers et al., Y-T Exonucleases in phosphorothioate-based oligonucleotide-directed mutagenesis, Nucl. Acids Res. 16:791-802 (1988); Sayers et al., Strand specific cleavage of phosphorothioate-containing DNA by reaction with restriction endonucleases in the presence of ethidium bromide, (1988) Nucl. Acids Res. 16: 803-814; Sieber, et al., Nature Biotechnology, 19:456-460 (2001); Smith, In vitro mutagenesis, Ann. Rev. Genet. 19:423-462 (1985); Methods in Enzymol. 100: 468-500 (1983); Methods in Enzymol. 154: 329-350 (1987); Stemmer, Nature 370, 389-91(1994); Taylor et al., The use of phosphorothioate-modified DNA in restriction enzyme reactions to prepare nicked DNA, Nucl. Acids Res. 13: 8749-8764 (1985); Taylor et al., The rapid generation of oligonucleotide-directed mutations at high frequency using phosphorothioate-modified DNA, Nucl. Acids Res. 13: 8765-8787 (1985); Wells et al., Importance of hydrogen-bond formation in stabilizing the transition state of subtilisin, Phil. Trans. R. Soc. Lond. A 317: 415-423 (1986); Wells et al., Cassette mutagenesis: an efficient method for generation of multiple mutations at defined sites, Gene 34:315-323 (1985); Zoller & Smith, Oligonucleotide-directed mutagenesis using M 13-derived vectors: an efficient and general procedure for the production of point mutations in any DNA fragment, Nucleic Acids Res. 10:6487-6500 (1982); Zoller & Smith, Oligonucleotide-directed mutagenesis of DNA fragments cloned into M13 vectors, Methods in Enzymol. 100:468-500 (1983); Zoller & Smith, Oligonucleotide-directed mutagenesis: a simple method using two oligonucleotide primers and a single-stranded DNA template, Methods in Enzymol. 154:329-350 (1987); Clackson et al. (1991) “Making antibody fragments using phage display libraries” Nature 352:624-628; Gibbs et al. (2001) “Degenerate oligonucleotide gene shuffling (DOGS): a method for enhancing the frequency of recombination with family shuffling” Gene 271:13-20; and Hiraga and Arnold (2003) “General method for sequence-independent site-directed chimeragenesis: J. Mol. Biol. 330:287-296. Additional details on many of the above methods can be found in Methods in Enzymology Volume 154, which also describes useful controls for trouble-shooting problems with various mutagenesis methods.

[0296] Determining Kinetic Parameters

[0297] The polymerases of the invention can be screened or otherwise tested to determine whether the polymerase displays a modified activity for or with a nucleotide analog or template as compared to a parental DNA polymerase (e.g., a corresponding wild-type or available mutant polymerase from which the recombinant polymerase of the invention was derived). For example, branching fraction, a reaction rate constant, k_{off}, k_{cat}, Kₘ, Vₘₐₓ, k_{cat}/Kₘ, Vₘₐₓ/Kₘ, kₚₒₗ, and/or K_{d} of the recombinant DNA polymerase for the nucleotide (or analog) or template nucleic acid can be determined. The enzyme perfection metric k_{cat}/Kₘ is also a useful measure, e.g., for assessing branch rate. k_{cat}/Kₘ is a measure of substrate binding that leads to product formation (and, thus, includes terms defining binding K_{d} and inversely predicts branching fraction formation).

[0298] As is well-known in the art, for enzymes obeying simple Michaelis-Menten kinetics, kinetic parameters are readily derived from rates of catalysis measured at different substrate concentrations. The Michaelis-Menten equation, V=Vₘₐₓ[S]([S]+Kₘ)⁻¹, relates the concentration of uncombined substrate ([S], approximated by the total substrate concentration), the maximal rate (Vₘₐₓ, attained when the enzyme is saturated with substrate), and the Michaelis constant (Kₘ, equal to the substrate concentration at which the reaction rate is half of its maximal value), to the reaction rate (V).

[0299] For many enzymes, Kₘ is equal to the dissociation constant of the enzyme-substrate complex and is thus a measure of the strength of the enzyme-substrate complex. For such an enzyme, in a comparison of Kₘs, a lower Kₘ represents a complex with stronger binding, while a higher Km represents a complex with weaker binding. The ratio k_{cat}/Kₘ, sometimes called the specificity constant, represents the apparent rate constant for combination of substrate with free enzyme. The larger the specificity constant, the more efficient the enzyme is in binding the substrate and converting it to product (this provides an inverse measure of branching rate, as branching rate is the rate at which the enzyme binds substrate (e.g., nucleotide), but does not convert it to product (e.g., a DNA polymer).

[0300] k_{cat} (also called the turnover number of the enzyme) can be determined if the total enzyme concentration ([E_{T}], i.e., the concentration of active sites) is known, since Vₘₐₓ=k_{cat}[E_{T}]. For situations in which the total enzyme concentration is difficult to measure, the ratio Vₘₐₓ/Kₘ is often used instead as a measure of efficiency. Kₘ and Vₘₐₓ can be determined, for example, from a Lineweaver-Burk plot of 1/V against 1/[S], where the y intercept represents 1/Vₘₐₓ, the x intercept −1/Kₘ, and the slope Kₘ/Vₘₐₓ, or from an Eadie-Hofstee plot of V against V/[S], where the y intercept represents Vₘₐₓ, the x intercept Vₘₐₓ/Kₘ, and the slope −Kₘ. Software packages such as KinetAsyst™ or Enzfit (Biosoft, Cambridge, UK) can facilitate the determination of kinetic parameters from catalytic rate data.

[0301] For enzymes such as polymerases that have multiple substrates, varying the concentration of only one substrate while holding the others in suitable excess (e.g., effectively constant) concentration typically yields normal Michaelis-Menten kinetics.

[0302] Details regarding k_{off} determination are described above. In general, the dissociation rate can be measured in any manner that detects the polymerase/DNA complex over time. This includes stopped-flow spectroscopy, or even simply taking aliquots over time and testing for polymerase activity on the template of interest. Free polymerase is captured with a polymerase trap after dissociation, e.g., by incubation in the presence of heparin or an excess of competitor DNA (e.g., non-specific salmon sperm DNA, or the like).

[0303] In one embodiment, using pre-steady-state kinetics, the nucleotide concentration dependence of the rate constant k_{obs} (the observed first-order rate constant for dNTP incorporation) provides an estimate of the Kₘ for a ground state binding and the maximum rate of polymerization (kₚₒₗ). The k_{obs} is measured using a burst assay. The results of the assay are fitted with the Burst equation; Product=A[1−exp(−k_{obs}*t)]+kₛₛ*t where A represents amplitude an estimate of the concentration of the enzyme active sites, kₛₛ is the observed steady-state rate constant and t is the reaction incubation time. The Kₘ for dNTP binding to the polymerase-DNA complex and the kₚₒₗ are calculated by fitting the dNTP concentration dependent change in the k_{obs} using the equation k_{obs}=(kₚₒₗ*[S])*(Kₘ+[S])−1 where [S] is the substrate concentration. Results are optionally obtained from a rapid-quench experiment (also called a quench-flow measurement), for example, based on the methods described in Johnson (1986) “Rapid kinetic analysis of mechanochemical adenosinetriphosphatases” Methods Enzymol. 134:677-705, Patel et al. (1991) “Pre-steady-state kinetic analysis of processive DNA replication including complete characterization of an exonuclease-deficient mutant” Biochemistry 30(2):511-25, and Tsai and Johnson (2006) “A new paradigm for DNA polymerase specificity” Biochemistry 45(32):9675-87.

[0304] Parameters such as rate of binding of a nucleotide analog or template by the recombinant polymerase, rate of product release by the recombinant polymerase, or branching rate of the recombinant polymerase can also be determined, and optionally compared to that of a parental polymerase (e.g., a corresponding wild-type polymerase).

[0305] For a more thorough discussion of enzyme kinetics, see, e.g., Berg, Tymoczko, and Stryer (2002) Biochemistry, Fifth Edition, W. H. Freeman; Creighton (1984) Proteins: Structures and Molecular Principles, W. H. Freeman; and Fersht (1985) Enzyme Structure and Mechanism, Second Edition, W. H. Freeman.

[0306] In one aspect, the improved activity of the enzymes of the invention is compared with a given parental polymerase. For example, in the case of enzymes derived from a Φ29 parental enzyme, where the improvement being sought is an increase in stability of the closed complex, an improved enzyme of the invention would have a lower k_{off} than the parental enzyme, e.g., wild type Φ29. Such comparisons are made under equivalent reaction conditions, e.g., equal concentrations of the parental and modified polymerase, equal substrate concentrations, equivalent solution conditions (pH, salt concentration, presence of divalent cations, etc.), temperature, and the like. In one aspect, the improved activity of the enzymes of the invention is measured with reference to a model analog or analog set and compared with a given parental enzyme. Optionally, the improved activity of the enzymes of the invention is measured under specified reaction conditions. While the foregoing may be used as a characterization tool, it in no way is intended as a specifically limiting reaction of the invention.

[0307] Optionally, the polymerase also exhibits a Kₘ for a phosphate-labeled nucleotide analog that is less than a Kₘ observed for a wild-type polymerase for the analog to facilitate applications in which the polymerase incorporates the analog, e.g., during SMS. For example, the modified recombinant polymerase can exhibit a Kₘ for the phosphate-labeled nucleotide analog that is less than less than 75%, 50%, 25% or less than that of wild-type or parental polymerase such as a wild type Φ29. In one specific class of examples, the polymerases of the invention have a Kₘ of about 10 μM or less for a non-natural nucleotide analog such as a phosphate labeled analog.

[0308] Determining Whether a Polymerase System Exhibits Two Slow Steps

[0309] In some cases the presence of two slow steps can be ascertained by the characteristics of the polymerase reaction run under single molecule sequencing conditions, for example by measuring the distribution of pulse widths. For example, a distribution of pulse widths can be determined using systems described herein where the components of the system are labeled such that a bright state is observed during nucleotide binding, and a dark state is observed from after product release until the next nucleotide binding event. Under these conditions a bright pulse will be observed that corresponds to bound nucleotide. The width of the pulse corresponds to the amount of time that the nucleotide is bound. By measuring the width of a number of pulses, corresponding to a number of nucleotide incorporation events, a distribution of pulse widths can be obtained. From this distribution of pulse widths, in some cases, it can be determined that a polymerase reaction having two slow steps is occurring, and in particular, a polymerase reaction having two slow steps during the bright state during which the nucleotide is associated with the polymerase enzyme. The use of a distribution of pulses to determine a kinetic mechanism having two slow (kinetically observable) steps is described, for example, in Miyake et al. Analytical Chemistry 2008 80 (15), 6018-6022.

[0310] Analogously, the presence of two slow steps in the dark phase of a polymerase reaction can in some cases be detected by determining the distribution of the time between pulses (interpulse time). Where the system exhibits two slow steps, a distribution described by a double exponential can be seen.

[0311] In some cases, it is not possible or not practical to determine under single molecule conditions whether a system is exhibiting two slow-step kinetics. For example, in some cases, the frame time of the detection optics will be slow enough that a significant number of pulses or interpulse times are not detected, precluding a reliable determination of pulse width or interpulse time distribution. In such cases, the presence of two slow-step kinetics under such polymerase reaction conditions can be determined by running a reaction under substantially the same polymerase reaction conditions, but not under single molecule conditions. For example, a reaction can be run under substantially the same polymerase reaction conditions as the single molecule sequencing system, but with a higher concentration of polymerase enzyme and in some cases, a higher concentration of primer and/or template nucleotide. The reaction run under substantially the same polymerase reaction conditions, but with higher concentrations of polymerase enzyme, primer, and/or template can be used to determine whether the system shows two slow steps as described herein. The reaction to determine two slow-step kinetics may have labels on different components of the reaction than that for single molecule sequencing, such as having labels on the template nucleic acid.

[0312] For example, a stopped-flow reaction such as described in the examples below can be used to determine whether the polymerase reaction conditions exhibit two slow steps. As described in the examples, stopped-flow experiments can be used to establish that the polymerase reaction is exhibiting two slow step kinetics either in a bright phase or in a dark phase for single molecule sequencing.

[0313] A higher enzyme/primer/template concentration reaction such as a stopped-flow reaction can be used to identify systems having two slow steps for single molecule sequencing. Alternatively, the reaction run under substantially the same conditions but higher concentration of enzyme/primer/template can be used to verify that a single molecule sequencing system is being carried out under polymerase reaction conditions that exhibit two slow steps.

[0314] Screening Polymerases

[0315] Screening or other protocols can be used to determine whether a polymerase displays a modified activity, e.g., for a nucleotide analog, as compared to a parental DNA polymerase. For example, branching fraction, rate constant, k_{off}, k_{cat}, Kₘ, Vₘₐₓ, or k_{cat}/Kₘ of the recombinant DNA polymerase for the template or nucleotide or analog can be determined as discussed above. As another example, activity can be assayed indirectly, e.g., as described in Example 4. Assays for properties such as protein yield, thermostability, and the like are described herein. Performance of a recombinant polymerase in a sequencing reaction, e.g., a single molecule sequencing reaction, can be examined to assay properties such as speed, pulse width, interpulse distance, accuracy, readlength, etc. as described herein.

[0316] In one desirable aspect, a library of recombinant DNA polymerases can be made and screened for these properties. For example, a plurality of members of the library can be made to include one or more mutation that alters (e.g., decreases) reaction rate constants, improves closed complex stability, decreases branching fraction, alters cofactor selectivity, or increases yield, thermostability, accuracy, speed, or readlength and/or randomly generated mutations (e.g., where different members include different mutations or different combinations of mutations), and the library can then be screened for the properties of interest (e.g., decreased rate constant, decreased branching fraction, increased closed complex stability, etc.). In general, the library can be screened to identify at least one member comprising a modified activity of interest.

[0317] Libraries of polymerases can be either physical or logical in nature. Moreover, any of a wide variety of library formats can be used. For example, polymerases can be fixed to solid surfaces in arrays of proteins. Similarly, liquid phase arrays of polymerases (e.g., in microwell plates) can be constructed for convenient high-throughput fluid manipulations of solutions comprising polymerases. Liquid, emulsion, or gel-phase libraries of cells that express recombinant polymerases can also be constructed, e.g., in microwell plates, or on agar plates. Phage display libraries of polymerases or polymerase domains (e.g., including the active site region or interdomain stability regions) can be produced. Likewise, yeast display libraries can be used. Instructions in making and using libraries can be found, e.g., in Sambrook, Ausubel and Berger, referenced herein.

[0318] For the generation of libraries involving fluid transfer to or from microtiter plates, a fluid handling station is optionally used. Several “off the shelf” fluid handling stations for performing such transfers are commercially available, including e.g., the Zymate systems from Caliper Life Sciences (Hopkinton, Mass.) and other stations which utilize automatic pipettors, e.g., in conjunction with the robotics for plate movement (e.g., the ORCA® robot, which is used in a variety of laboratory systems available, e.g., from Beckman Coulter, Inc. (Fullerton, Calif.).

[0319] In an alternate embodiment, fluid handling is performed in microchips, e.g., involving transfer of materials from microwell plates or other wells through microchannels on the chips to destination sites (microchannel regions, wells, chambers or the like). Commercially available microfluidic systems include those from Hewlett-Packard/Agilent Technologies (e.g., the HP2100 bioanalyzer) and the Caliper High Throughput Screening System. The Caliper High Throughput Screening System provides one example interface between standard microwell library formats and Labchip technologies. RainDance Technologies' nanodroplet platform provides another method for handling large numbers of spatially separated reactions. Furthermore, the patent and technical literature includes many examples of microfluidic systems which can interface directly with microwell plates for fluid handling.

[0320] Desirable Properties

[0321] The polymerases of the invention can include any of a variety of modified properties towards natural nucleotides and/or nucleotide analogs, depending on the application, including decreased branching fraction, increased closed complex stability, increased speed, increased retention time (or decreased speed) for incorporated bases, greater processivity, slower product release, slower isomerization, slower translocation, increased accuracy, increased readlength, etc. For example, k_{off} can be measured to detect closed complex stability, as noted herein. k_{cat}/Kₘ can be determined as an inverse measure of branch formation. Alternately, branch formation can be directly monitored in high-throughput SMS reactions using known templates. Branch fraction formation or complex stability can be screened for or against in selecting a polymerase of the invention, e.g., by screening enzymes based on kinetic or product formation properties.

[0322] For example, improvements in a dissociation rate (or improved processivity) of 30% or more, e.g., about 50%, 75%, or even 100% or more can be screened for in identifying polymerases that display closed complex stability. Similarly, detecting mutant polymerases that form branching fractions of less than 25%, e.g., 10% or less, 5% or less, and even 1% or 0.1% or less is a feature of the invention.

### Additional Example Details

[0323] A number of specific examples of modified active site and interdomain regions are described herein. An “active site region” is a portion of the polymerase that includes or is proximal to the active site (e.g., within about 2 nm of the active site) in a three dimensional structure of a folded polymerase. Similarly, an interdomain region or residue occurs in the region between two domains, e.g., when the enzyme is in the closed conformation or a closed complex. Specific examples of structural modifications within or proximal to the active site or interdomain regions of Φ29 DNA polymerase are described herein.

[0324] A recombinant polymerase optionally further includes one or more mutations relative to the wild-type polymerase that provide additional properties of interest, including deletion or insertion of steric features near the active site that improve specificity for an unnatural nucleotide, or that improve surface bound activity of the protein, or the like. A variety of useful additional mutations that can be used in combination with the present invention are described, e.g., in WO 2007/076057 POLYMERASES FOR NUCLEOTIDE ANALOGUE INCORPORATION by Hanzel et al.; WO 2008/051530 POLYMERASE ENZYMES AND REAGENTS FOR ENHANCED NUCLEIC ACID SEQUENCING by Rank et al.; WO 2007/075987 ACTIVE SURFACE COUPLED POLYMERASES by Hanzel et al.; WO 2007/076057 PROTEIN ENGINEERING STRATEGIES TO OPTIMIZE ACTIVITY OF SURFACE ATTACHED PROTEINS by Hanzel et al.; U.S. patent application Ser. No. 12/584,481 filed Sep. 4, 2009, by Pranav Patel et al. entitled “ENGINEERING POLYMERASES AND REACTION CONDITIONS FOR MODIFIED INCORPORATION PROPERTIES”; and U.S. patent application Ser. No. 12/384,110 filed Mar. 30, 2009, by Keith Bjornson et al. entitled “Enzymes Resistant to Photodamage.”

[0325] As will be appreciated, the numbering of amino acid residues is with respect to a particular reference polymerase, such as the wild-type sequence of the Φ29 polymerase (SEQ ID NO:1); actual position of a mutation within a molecule of the invention may vary based upon the nature of the various modifications that the enzyme includes relative to the wild type Φ29 enzyme, e.g., deletions and/or additions to the molecule, either at the termini or within the molecule itself.

[0326] Tags And Other Optional Polymerase Features

[0327] The recombinant DNA polymerase optionally includes additional features exogenous or heterologous to the polymerase. For example, the recombinant polymerase optionally includes one or more tags, e.g., purification, substrate binding, or other tags, such as a polyhistidine tag, a His10 tag, a His6 tag, an alanine tag, an Ala16 tag, an Ala16 tag, a biotin tag, a biotin ligase recognition sequence or other biotin attachment site (e.g., a BiTag or a Btag or variant thereof, e.g., BtagV1-11), a GST tag, an S Tag, a SNAP-tag, an HA tag, a DSB (Sso7D) tag, a lysine tag, a NanoTag, a Cmyc tag, a tag or linker comprising the amino acids glycine and serine, a tag or linker comprising the amino acids glycine, serine, alanine and histidine, a tag or linker comprising the amino acids glycine, arginine, lysine, glutamine and proline, a plurality of polyhistidine tags, a plurality of His10 tags, a plurality of His6 tags, a plurality of alanine tags, a plurality of Ala10 tags, a plurality of Ala16 tags, a plurality of biotin tags, a plurality of GST tags, a plurality of BiTags, a plurality of S Tags, a plurality of SNAP-tags, a plurality of HA tags, a plurality of DSB (Sso7D) tags, a plurality of lysine tags, a plurality of NanoTags, a plurality of Cmyc tags, a plurality of tags or linkers comprising the amino acids glycine and serine, a plurality of tags or linkers comprising the amino acids glycine, serine, alanine and histidine, a plurality of tags or linkers comprising the amino acids glycine, arginine, lysine, glutamine and proline, biotin, avidin, an antibody or antibody domain, antibody fragment, antigen, receptor, receptor domain, receptor fragment, or ligand, one or more protease site (e.g., Factor Xa, enterokinase, or thrombin site), a dye, an acceptor, a quencher, a DNA binding domain (e.g., a helix-hairpin-helix domain from topoisomerase V), or combination thereof. The one or more exogenous or heterologous features at the N- and/or C-terminal regions of the polymerase can find use not only for purification purposes, immobilization of the polymerase to a substrate, and the like, but can also be useful for altering one or more properties of the polymerase.

[0328] The one or more exogenous or heterologous features can be included internal to the polymerase, at the N-terminal region of the polymerase, at the C-terminal region of the polymerase, or both the N-terminal and C-terminal regions of the polymerase. Where the polymerase includes an exogenous or heterologous feature at both the N-terminal and C-terminal regions, the exogenous or heterologous features can be the same (e.g., a polyhistidine tag, e.g., a His10 tag, at both the N- and C-terminal regions) or different (e.g., a biotin ligase recognition sequence at the N-terminal region and a polyhistidine tag, e.g., His10 tag, at the C-terminal region). Optionally, a terminal region (e.g., the N- or C-terminal region) of a polymerase of the invention can comprise two or more exogenous or heterologous features which can be the same or different (e.g., a biotin ligase recognition sequence and a polyhistidine tag at the N-terminal region, a biotin ligase recognition sequence, a polyhistidine tag, and a Factor Xa recognition site at the N-terminal region, and the like). As a few examples, the polymerase can include a polyhistidine tag at the C-terminal region, a biotin ligase recognition sequence and a polyhistidine tag at the N-terminal region, a biotin ligase recognition sequence and a polyhistidine tag at the N-terminal region and a polyhistidine tag at the C-terminal region, or a polyhistidine tag and a biotin ligase recognition sequence at the C-terminal region.

[0329] Table 10 provides exemplary exogenous features (e.g., tags, linkers, and the like) that are optionally present in polymerases of the invention. As noted above, polymerases of the invention can include any of these features alone or in combination with one or more additional features, typically at the N-terminal and/or C-terminal regions of the polymerase. Note that the initial glycine residue shown for the polyhistidine and polyalanine tags is optional.

TABLE 10

| Feature Name | Amino Acid Sequence |
|---|---|
| GST | MSPILGYWKIKGLVQPTRLLLEYLEEK |
| SEQ ID NO: 7 | YEEHLYERDEGDKWRNKKFELGLEFPN |
| | LPYYIDGDVKLTQSMAIIRYIADKHNM |
| | LGGCPKERAEISMLEGAVLDIRYGVSR |
| | IAYSKDFETLKVDFLSKLPEMLKMFED |
| | RLCHKTYLNGDHVTHPDFMLYDALDVV |
| | LYMDPMCLDAFPKLVCFKKRIEAIPQI |
| | DKYLKSSKYIAWPLQGWQATFGGGDHP |
| | PK |
| Xa SEQ ID NO: 8 | IEGR |
| Btag SEQ ID NO: 9 | GLNDIFEAQKIEWHE |
| BtagV1 SEQ ID NO: 10 | GLNDLFHAQKIEWHE |
| BtagV2 SEQ ID NO: 11 | GLNDFFNAQKIEWHE |
| BtagV3 SEQ ID NO: 12 | GINDLFSAQKIEWHE |
| BtagV4 SEQ ID NO: 13 | GINDIFEAQKIEWHE |
| BtagV5 SEQ ID NO: 14 | GLNLIFEAQKIEWHE |
| BtagV6 SEQ ID NO: 15 | GLNDLFEAQKIEWHE |
| BtagV7 SEQ ID NO: 16 | GLNDFFEAQKIEWHE |
| BtagV8 SEQ ID NO: 17 | GLNDIVEAQKIEWHE |
| BtagV9 SEQ ID NO: 18 | GLNDIFHAQKIEWHE |
| BtagV10 SEQ ID NO: 19 | GLNDIFNAQKIEWHE |
| BtagV11 SEQ ID NO: 20 | GLNDIFSAQKIEWHE |
| NanoTag SEQ ID NO: 21 | DVEAWLGARVPLVET |
| GSGAAAAAAAAAH | GSGAAAAAAAAAH |
| SEQ ID NO: 22 | |
| 1942Linker | GGSGGGSGGGSGG |
| SEQ ID NO: 23 | |
| Ala10 SEQ ID NO: 24 | AAAAAAAAAA |
| GRKKRRQRRRPPQ | GRKKRRQRRRPPQ |
| SEQ ID NO: 25 | |
| Ktag(10) SEQ ID NO: 26 | KKKKKKKKKK |
| GSGAAAAAAAAHH | GSGAAAAAAAAHH |
| SEQ ID NO: 27 | |
| GSGAAAAAAAHHH | GSGAAAAAAAHHH |
| SEQ ID NO: 28 | |
| Cmyc SEQ ID NO: 29 | EQKLISEEDL |
| DSB (Sso7d) | MATVKFKYKGEEKEVDISKIKKVWRVG |
| SEQ ID NO: 30 | KMISFTYDEGGGKTGRGAVSEKDAPKE |
| | LLQMLEKQKK |
| His6 SEQ ID NO: 31 | GHHHHHH |
| His7 SEQ ID NO: 32 | GHHHHHHH |
| His8 SEQ ID NO: 33 | GHHHHHHHH |
| His9 SEQ ID NO: 34 | GHHHHHHHHH |
| His10 SEQ ID NO: 35 | GHHHHHHHHHH |
| His11 SEQ ID NO: 36 | GHHHHHHHHHHH |
| His12 SEQ ID NO: 37 | GHHHHHHHHHHHH |
| His13 SEQ ID NO: 38 | GHHHHHHHHHHHHH |
| His14 SEQ ID NO: 39 | GHHHHHHHHHHHHHH |
| His15 SEQ ID NO: 40 | GHHHHHHHHHHHHHHH |
| His16 SEQ ID NO: 41 | GHHHHHHHHHHHHHHHH |
| His17 SEQ ID NO: 42 | GHHHHHHHHHHHHHHHHH |
| His18 SEQ ID NO: 43 | GHHHHHHHHHHHHHHHHHH |
| His19 SEQ ID NO: 44 | GHHHHHHHHHHHHHHHHHHH |
| His20 SEQ ID NO: 45 | GHHHHHHHHHHHHHHHHHHHH |
| His21 SEQ ID NO: 46 | GHHHHHHHHHHHHHHHHHHHHH |
| His22 SEQ ID NO: 47 | GHHHHHHHHHHHHHHHHHHHHHH |
| His23 SEQ ID NO: 48 | GHHHHHHHHHHHHHHHHHHHHHHH |
| His24 SEQ ID NO: 49 | GHHHHHHHHHHHHHHHHHHHHHHHH |
| Ala16 SEQ ID NO: 50 | GAAAAAAAAAAAAAAAA |

[0330] As described in greater detail in U.S. patent application Ser. No. 12/584,481 filed Sep. 4, 2009, by Pranav Patel et al. entitled “ENGINEERING POLYMERASES AND REACTION CONDITIONS FOR MODIFIED INCORPORATION PROPERTIES,” fusion of a heterologous sequence at or near the C-terminus of the polymerase can also alter polymerase behavior. For example, fusion of a polyhistidine sequence at the C-terminus can slow translocation, decrease exonuclease activity, and/or increase accuracy. As just one example, a modified Φ29 T368F/E375Y/A484E/K512Y polymerase with a His10 tag (ten histidine polyhistidine tag) fused to its C-terminus (e.g., along with an N-terminal biotin attachment site followed by an N-terminal His10 tag) demonstrates two slow step behavior. That this polymerase (and other polymerases described herein that include one or more heterologous or exogenous features at the C-terminal region) retains its functionality is a surprising aspect of the invention. The active site of the polymerase is located in the C-terminal portion of the protein, and previous attempts to modify the C-terminal portion have rendered the polymerase inactive. See, e.g., Truniger, et al. (2004) “Function of the C-terminus of Φ29 DNA polymerase in DNA and terminal protein binding” Nucleic Acids Research 32(1): 361-370.

[0331] The exogenous or heterologous features can find use, e.g., in the context of binding a polymerase in an active form to a surface, e.g., to orient and/or protect the polymerase active site when the polymerase is bound to a surface. In general, surface binding elements and purification tags that can be added to the polymerase (recombinantly or, e.g., chemically) include, e.g., biotin attachment sites (e.g., biotin ligase recognition sequences such as Btags or BiTag), polyhistidine tags, His6 tags, biotin, avidin, GST sequences, modified GST sequences, e.g., that are less likely to form dimers, S tags, SNAP-tags, antibodies or antibody domains, antibody fragments, antigens, receptors, receptor domains, receptor fragments, ligands, or combinations thereof.

[0332] One aspect of the invention includes DNA polymerases that can be coupled to a surface without substantial loss of activity (e.g., in an active form). DNA polymerases can be coupled to the surface through a single surface coupling domain or multiple surface coupling domains, which act in concert to increase binding affinity of the polymerase for the surface and to orient the polymerase relative to the surface. For example, the active site can be oriented distal to the surface, thereby making it accessible to a polymerase substrate (template, nucleotides, etc.). This orientation also tends to reduce surface denaturation effects in the region of the active site. In a related aspect, activity of the enzyme can be protected by making the coupling domains large, thereby serving to further insulate the active site from surface binding effects. Further details regarding the immobilization of a polymerase to a surface (e.g., the surface of a zero mode waveguide) in an active form are found in WO 2007/075987 ACTIVE SURFACE COUPLED POLYMERASES by Hanzel et al., and WO 2007/076057 PROTEIN ENGINEERING STRATEGIES TO OPTIMIZE ACTIVITY OF SURFACE ATTACHED PROTEINS by Hanzel et al. Further details on attaching tags is available in the art. See, e.g., U.S. Pat. Nos. 5,723,584 and 5,874,239 for additional information on attaching biotinylation peptides to recombinant proteins.

[0333] The polymerase immobilized on a surface in an active form can be coupled to the surface through one or a plurality of artificial or recombinant surface coupling domains as discussed above, and typically displays a k_{cat}/Kₘ (or Vₘₐₓ/Kₘ) that is at least about 1%, at least about 10%, at least about 25%, at least about 50%, or at least about 75% as high as a corresponding active polymerase in solution.

### Making and Isolating Recombinant Polymerases

[0334] Generally, nucleic acids encoding a polymerase of the invention can be made by cloning, recombination, in vitro synthesis, in vitro amplification and/or other available methods. A variety of recombinant methods can be used for expressing an expression vector that encodes a polymerase of the invention. Methods for making recombinant nucleic acids, expression and isolation of expressed products are well known and described in the art. A number of exemplary mutations and combinations of mutations, as well as strategies for design of desirable mutations, are described herein. Methods for making and selecting mutations in the active site of polymerases, including for modifying steric features in or near the active site to permit improved access by nucleotide analogs are found hereinabove and, e.g., in WO 2007/076057 POLYMERASES FOR NUCLEOTIDE ANALOG INCORPORATION by Hanzel et al. and PCT/US2007/022459 POLYMERASE ENZYMES AND REAGENTS FOR ENHANCED NUCLEIC ACID SEQUENCING by Rank et al.

[0335] Additional useful references for mutation, recombinant and in vitro nucleic acid manipulation methods (including cloning, expression, PCR, and the like) include Berger and Kimmel, Guide to Molecular Cloning Techniques, Methods in Enzymology volume 152 Academic Press, Inc., San Diego, Calif. (Berger); Kaufman et al. (2003) Handbook of Molecular and Cellular Methods in Biology and Medicine Second Edition Ceske (ed) CRC Press (Kaufman); and The Nucleic Acid Protocols Handbook Ralph Rapley (ed) (2000) Cold Spring Harbor, Humana Press Inc (Rapley); Chen et al. (ed) PCR Cloning Protocols, Second Edition (Methods in Molecular Biology, volume 192) Humana Press; and in Viljoen et al. (2005)Molecular Diagnostic PCR Handbook Springer, ISBN 1402034032.

[0336] In addition, a plethora of kits are commercially available for the purification of plasmids or other relevant nucleic acids from cells, (see, e.g., EasyPrep™, FlexiPrep™ both from Pharmacia Biotech; StrataClean™, from Stratagene; and, QIAprep™ from Qiagen). Any isolated and/or purified nucleic acid can be further manipulated to produce other nucleic acids, used to transfect cells, incorporated into related vectors to infect organisms for expression, and/or the like. Typical cloning vectors contain transcription and translation terminators, transcription and translation initiation sequences, and promoters useful for regulation of the expression of the particular target nucleic acid. The vectors optionally comprise generic expression cassettes containing at least one independent terminator sequence, sequences permitting replication of the cassette in eukaryotes, or prokaryotes, or both, (e.g., shuttle vectors) and selection markers for both prokaryotic and eukaryotic systems. Vectors are suitable for replication and integration in prokaryotes, eukaryotes, or both.

[0337] Other useful references, e.g. for cell isolation and culture (e.g., for subsequent nucleic acid isolation) include Freshney (1994) Culture of Animal Cells, a Manual of Basic Technique, third edition, Wiley-Liss, New York and the references cited therein; Payne et al. (1992) Plant Cell and Tissue Culture in Liquid Systems John Wiley & Sons, Inc. New York, N.Y.; Gamborg and Phillips (eds) (1995) Plant Cell, Tissue and Organ Culture; Fundamental Methods Springer Lab Manual, Springer-Verlag (Berlin Heidelberg New York) and Atlas and Parks (eds) The Handbook of Microbiological Media (1993) CRC Press, Boca Raton, Fla.

[0338] Nucleic acids encoding the recombinant polymerases of the invention are also a feature of the invention. A particular amino acid can be encoded by multiple codons, and certain translation systems (e.g., prokaryotic or eukaryotic cells) often exhibit codon bias, e.g., different organisms often prefer one of the several synonymous codons that encode the same amino acid. As such, nucleic acids of the invention are optionally “codon optimized,” meaning that the nucleic acids are synthesized to include codons that are preferred by the particular translation system being employed to express the polymerase. For example, when it is desirable to express the polymerase in a bacterial cell (or even a particular strain of bacteria), the nucleic acid can be synthesized to include codons most frequently found in the genome of that bacterial cell, for efficient expression of the polymerase. A similar strategy can be employed when it is desirable to express the polymerase in a eukaryotic cell, e.g., the nucleic acid can include codons preferred by that eukaryotic cell.

[0339] A variety of protein isolation and detection methods are known and can be used to isolate polymerases, e.g., from recombinant cultures of cells expressing the recombinant polymerases of the invention. A variety of protein isolation and detection methods are well known in the art, including, e.g., those set forth in R. Scopes, Protein Purification, Springer-Verlag, N.Y. (1982); Deutscher, Methods in Enzymology Vol. 182: Guide to Protein Purification, Academic Press, Inc. N.Y. (1990); Sandana (1997) Bioseparation of Proteins, Academic Press, Inc.; Bollag et al. (1996) Protein Methods, 2^{nd} Edition Wiley-Liss, NY; Walker (1996) The Protein Protocols Handbook Humana Press, NJ, Harris and Angal (1990) Protein Purification Applications: A Practical Approach IRL Press at Oxford, Oxford, England; Harris and Angal Protein Purification Methods: A Practical Approach IRL Press at Oxford, Oxford, England; Scopes (1993) Protein Purification: Principles and Practice 3^{rd} Edition Springer Verlag, NY; Janson and Ryden (1998) Protein Purification: Principles, High Resolution Methods and Applications, Second Edition Wiley-VCH, NY; and Walker (1998) Protein Protocols on CD-ROM Humana Press, NJ; and the references cited therein. Additional details regarding protein purification and detection methods can be found in Satinder Ahuja ed., Handbook of Bioseparations, Academic Press (2000).

### Kits

[0340] The present invention also features kits that incorporate the polymerases of the invention, optionally with additional useful reagents such as one or more nucleotide analogs, e.g., for sequencing, nucleic acid amplification, or the like. Such kits can include the polymerase of the invention packaged in a fashion to enable use of the polymerase (e.g., the polymerase immobilized in a ZMW array), a set of different nucleotide analogs of the invention, e.g., those that are analogous to A, T, G, and C, e.g., where one or more of the analogs comprise a detectable moiety, to permit identification in the presence of the analogs. Depending upon the desired application, the kits of the invention optionally include additional reagents, such as natural nucleotides, a control template, and other reagents, such as buffer solutions and/or salt solutions, including, e.g., divalent metal ions such as Ca⁺⁺, Mg⁺⁺, Mn⁺⁺ and/or Fe⁺⁺, and standard solutions, e.g., dye standards for detector calibration. Such kits also typically include instructions for use of the compounds and other reagents in accordance with the desired application methods, e.g., nucleic acid sequencing, amplification and the like.

### Nucleic Acid and Polypeptide Sequences and Variants

[0341] As described herein, the invention also features polynucleotide sequences encoding, e.g., a polymerase as described herein. Examples of polymerase sequences that include features found herein, e.g., as in Tables 1-9, 13, and 16 are provided. However, one of skill in the art will immediately appreciate that the invention is not limited to the specifically exemplified sequences. For example, one of skill will appreciate that the invention also provides, e.g., many related sequences with the functions described herein, e.g., polynucleotides and polypeptides encoding conservative variants of a polymerase of Tables 1-9, 13, and 16 or any other specifically listed polymerase herein. Combinations of any of the mutations noted herein or combinations of any of the mutations herein in combination with those noted in other available references relating to improved polymerases, such as Hanzel et WO 2007/076057 POLYMERASES FOR NUCLEOTIDE ANALOGUE INCORPORATION; Rank et al. WO 2008/051530 POLYMERASE ENZYMES AND REAGENTS FOR ENHANCED NUCLEIC ACID SEQUENCING; Hanzel et al. WO 2007/075987 ACTIVE SURFACE COUPLED POLYMERASES; Hanzel et al. WO 2007/076057 PROTEIN ENGINEERING STRATEGIES TO OPTIMIZE ACTIVITY OF SURFACE ATTACHED PROTEINS; U.S. patent application Ser. No. 12/584,481 filed Sep. 4, 2009, by Pranav Patel et al. entitled “ENGINEERING POLYMERASES AND REACTION CONDITIONS FOR MODIFIED INCORPORATION PROPERTIES”; and U.S. patent application Ser. No. 12/384,110 filed Mar. 30, 2009, by Keith Bjornson et al. entitled “Enzymes Resistant to Photodamage” are also features of the invention.

[0342] Accordingly, the invention provides a variety of polypeptides (polymerases) and polynucleotides (nucleic acids that encode polymerases). Exemplary polynucleotides of the invention include, e.g., any polynucleotide that encodes a polymerase of Tables 1-9, 13, and 16 or otherwise described herein. Because of the degeneracy of the genetic code, many polynucleotides equivalently encode a given polymerase sequence. Similarly, an artificial or recombinant nucleic acid that hybridizes to a polynucleotide indicated above under highly stringent conditions over substantially the entire length of the nucleic acid (and is other than a naturally occurring polynucleotide) is a polynucleotide of the invention. In one embodiment, a composition includes a polypeptide of the invention and an excipient (e.g., buffer, water, pharmaceutically acceptable excipient, etc.). The invention also provides an antibody or antisera specifically immunoreactive with a polypeptide of the invention (e.g., that specifically recognizes a feature of the polymerase that confers decreased branching or increased complex stability.

[0343] In certain embodiments, a vector (e.g., a plasmid, a cosmid, a phage, a virus, etc.) comprises a polynucleotide of the invention. In one embodiment, the vector is an expression vector. In another embodiment, the expression vector includes a promoter operably linked to one or more of the polynucleotides of the invention. In another embodiment, a cell comprises a vector that includes a polynucleotide of the invention.

[0344] One of skill will also appreciate that many variants of the disclosed sequences are included in the invention. For example, conservative variations of the disclosed sequences that yield a functionally similar sequence are included in the invention. Variants of the nucleic acid polynucleotide sequences, wherein the variants hybridize to at least one disclosed sequence, are considered to be included in the invention. Unique subsequences of the sequences disclosed herein, as determined by, e.g., standard sequence comparison techniques, are also included in the invention.

[0345] Conservative Variations

[0346] Owing to the degeneracy of the genetic code, “silent substitutions” (i.e., substitutions in a nucleic acid sequence which do not result in an alteration in an encoded polypeptide) are an implied feature of every nucleic acid sequence that encodes an amino acid sequence. Similarly, “conservative amino acid substitutions,” where one or a limited number of amino acids in an amino acid sequence are substituted with different amino acids with highly similar properties, are also readily identified as being highly similar to a disclosed construct. Such conservative variations of each disclosed sequence are a feature of the present invention.

[0347] “Conservative variations” of a particular nucleic acid sequence refers to those nucleic acids which encode identical or essentially identical amino acid sequences, or, where the nucleic acid does not encode an amino acid sequence, to essentially identical sequences. One of skill will recognize that individual substitutions, deletions or additions which alter, add or delete a single amino acid or a small percentage of amino acids (typically less than 5%, more typically less than 4%, 2% or 1%) in an encoded sequence are “conservatively modified variations” where the alterations result in the deletion of an amino acid, addition of an amino acid, or substitution of an amino acid with a chemically similar amino acid, while retaining the relevant mutational feature (for example, the conservative substitution can be of a residue distal to the active site region, or distal to an interdomain stability region). Thus, “conservative variations” of a listed polypeptide sequence of the present invention include substitutions of a small percentage, typically less than 5%, more typically less than 2% or 1%, of the amino acids of the polypeptide sequence, with an amino acid of the same conservative substitution group. Finally, the addition of sequences which do not alter the encoded activity of a nucleic acid molecule, such as the addition of a non-functional or tagging sequence (introns in the nucleic acid, poly His or similar sequences in the encoded polypeptide, etc.), is a conservative variation of the basic nucleic acid or polypeptide.

[0348] Conservative substitution tables providing functionally similar amino acids are well known in the art, where one amino acid residue is substituted for another amino acid residue having similar chemical properties (e.g., aromatic side chains or positively charged side chains), and therefore does not substantially change the functional properties of the polypeptide molecule. The following sets forth example groups that contain natural amino acids of like chemical properties, where substitutions within a group is a “conservative substitution”.

TABLE 11
Conservative amino acid substitutions

| Nonpolar | | | | |
|---|---|---|---|---|
| and/or | | | Negatively | |
| Aliphatic | Polar, | | Positively | Charged |
| Side | Uncharged | Aromatic Side | Charged Side | Side |
| Chains | Side Chains | Chains | Chains | Chains |
| Glycine | Serine | Phenylalanine | Lysine | Aspartate |
| Alanine | Threonine | Tyrosine | Arginine | Glutamate |
| Valine | Cysteine | Tryptophan | Histidine | |
| Leucine | Methionine | | | |
| Isoleucine | Asparagine | | | |
| Proline | Glutamine | | | |

[0349] Nucleic Acid Hybridization

[0350] Comparative hybridization can be used to identify nucleic acids of the invention, including conservative variations of nucleic acids of the invention. In addition, target nucleic acids which hybridize to a nucleic acid of the invention under high, ultra-high and ultra-ultra high stringency conditions, where the nucleic acids encode mutants corresponding to those noted in Tables 1-9, 13, and 16 or other listed polymerases, are a feature of the invention. Examples of such nucleic acids include those with one or a few silent or conservative nucleic acid substitutions as compared to a given nucleic acid sequence encoding a polymerase of Tables 1-9, 13, and 16 (or other exemplified polymerase), where any conservative substitutions are for residues other than those noted in Tables 1-9, 13, and 16 or elsewhere as being relevant to a feature of interest (improved closed complex stability, decreased branch fraction formation, etc.).

[0351] A test nucleic acid is said to specifically hybridize to a probe nucleic acid when it hybridizes at least 50% as well to the probe as to the perfectly matched complementary target, i.e., with a signal to noise ratio at least half as high as hybridization of the probe to the target under conditions in which the perfectly matched probe binds to the perfectly matched complementary target with a signal to noise ratio that is at least about 5×-10× as high as that observed for hybridization to any of the unmatched target nucleic acids.

[0352] Nucleic acids “hybridize” when they associate, typically in solution. Nucleic acids hybridize due to a variety of well characterized physico-chemical forces, such as hydrogen bonding, solvent exclusion, base stacking and the like. An extensive guide to the hybridization of nucleic acids is found in Tijssen (1993) Laboratory Techniques in Biochemistry and Molecular Biology—Hybridization with Nucleic Acid Probes part I chapter 2, “Overview of principles of hybridization and the strategy of nucleic acid probe assays,” (Elsevier, N.Y.), as well as in Current Protocols in Molecular Biology, Ausubel et al., eds., Current Protocols, a joint venture between Greene Publishing Associates, Inc. and John Wiley & Sons, Inc., (supplemented through 2011); Hames and Higgins (1995) Gene Probes 1 IRL Press at Oxford University Press, Oxford, England, (Hames and Higgins 1) and Hames and Higgins (1995) Gene Probes 2 IRL Press at Oxford University Press, Oxford, England (Hames and Higgins 2) provide details on the synthesis, labeling, detection and quantification of DNA and RNA, including oligonucleotides.

[0353] An example of stringent hybridization conditions for hybridization of complementary nucleic acids which have more than 100 complementary residues on a filter in a Southern or northern blot is 50% formalin with 1 mg of heparin at 42° C., with the hybridization being carried out overnight. An example of stringent wash conditions is a 0.2×SSC wash at 65° C. for 15 minutes (see, Sambrook, supra for a description of SSC buffer). Often the high stringency wash is preceded by a low stringency wash to remove background probe signal. An example low stringency wash is 2×SSC at 40° C. for 15 minutes. In general, a signal to noise ratio of 5×(or higher) than that observed for an unrelated probe in the particular hybridization assay indicates detection of a specific hybridization.

[0354] “Stringent hybridization wash conditions” in the context of nucleic acid hybridization experiments such as Southern and northern hybridizations are sequence dependent, and are different under different environmental parameters. An extensive guide to the hybridization of nucleic acids is found in Tijssen (1993), supra. and in Hames and Higgins, 1 and 2. Stringent hybridization and wash conditions can easily be determined empirically for any test nucleic acid. For example, in determining stringent hybridization and wash conditions, the hybridization and wash conditions are gradually increased (e.g., by increasing temperature, decreasing salt concentration, increasing detergent concentration and/or increasing the concentration of organic solvents such as formalin in the hybridization or wash), until a selected set of criteria are met. For example, in highly stringent hybridization and wash conditions, the hybridization and wash conditions are gradually increased until a probe binds to a perfectly matched complementary target with a signal to noise ratio that is at least 5× as high as that observed for hybridization of the probe to an unmatched target.

[0355] “Very stringent” conditions are selected to be equal to the thermal melting point (Tₘ) for a particular probe. The Tₘ is the temperature (under defined ionic strength and pH) at which 50% of the test sequence hybridizes to a perfectly matched probe. For the purposes of the present invention, generally, “highly stringent” hybridization and wash conditions are selected to be about 5° C. lower than the Tₘ for the specific sequence at a defined ionic strength and pH.

[0356] “Ultra high-stringency” hybridization and wash conditions are those in which the stringency of hybridization and wash conditions are increased until the signal to noise ratio for binding of the probe to the perfectly matched complementary target nucleic acid is at least 10× as high as that observed for hybridization to any of the unmatched target nucleic acids. A target nucleic acid which hybridizes to a probe under such conditions, with a signal to noise ratio of at least ½ that of the perfectly matched complementary target nucleic acid is said to bind to the probe under ultra-high stringency conditions.

[0357] Similarly, even higher levels of stringency can be determined by gradually increasing the hybridization and/or wash conditions of the relevant hybridization assay. For example, those in which the stringency of hybridization and wash conditions are increased until the signal to noise ratio for binding of the probe to the perfectly matched complementary target nucleic acid is at least 10×, 20×, 50×, 100×, or 500× or more as high as that observed for hybridization to any of the unmatched target nucleic acids. A target nucleic acid which hybridizes to a probe under such conditions, with a signal to noise ratio of at least ½ that of the perfectly matched complementary target nucleic acid is said to bind to the probe under ultra-ultra-high stringency conditions.

[0358] Nucleic acids that do not hybridize to each other under stringent conditions are still substantially identical if the polypeptides which they encode are substantially identical. This occurs, e.g., when a copy of a nucleic acid is created using the maximum codon degeneracy permitted by the genetic code.

[0359] Unique Subsequences

[0360] In some aspects, the invention provides a nucleic acid that comprises a unique subsequence in a nucleic acid that encodes a polymerase of Tables 1-9, 13, and 16 or others described herein. The unique subsequence may be unique as compared to a nucleic acid corresponding to, e.g., a wild type Φ29-type polymerase. Alignment can be performed using, e.g., BLAST set to default parameters. Any unique subsequence is useful, e.g., as a probe to identify the nucleic acids of the invention.

[0361] Similarly, the invention includes a polypeptide which comprises a unique subsequence in a polymerase of Tables 1-9, 13, and 16 or otherwise detailed herein. Here, the unique subsequence is unique as compared to, e.g., a wild type Φ29-type polymerase or previously characterized mutation thereof.

[0362] The invention also provides for target nucleic acids which hybridize under stringent conditions to a unique coding oligonucleotide which encodes a unique subsequence in a polypeptide selected from the modified polymerase sequences of the invention, wherein the unique subsequence is unique as compared to a polypeptide corresponding to wild type Φ29. Unique sequences are determined as noted above.

[0363] Sequence Comparison, Identity, and Homology

[0364] The terms “identical” or “percent identity,” in the context of two or more nucleic acid or polypeptide sequences, refer to two or more sequences or subsequences that are the same or have a specified percentage of amino acid residues or nucleotides that are the same, when compared and aligned for maximum correspondence, as measured using one of the sequence comparison algorithms described below (or other algorithms available to persons of skill) or by visual inspection.

[0365] The phrase “substantially identical,” in the context of two nucleic acids or polypeptides (e.g., DNAs encoding a polymerase, or the amino acid sequence of a polymerase) refers to two or more sequences or subsequences that have at least about 60%, about 80%, about 90-95%, about 98%, about 99% or more nucleotide or amino acid residue identity, when compared and aligned for maximum correspondence, as measured using a sequence comparison algorithm or by visual inspection. Such “substantially identical” sequences are typically considered to be “homologous,” without reference to actual ancestry. Preferably, the “substantial identity” exists over a region of the sequences that is at least about 50 residues in length, more preferably over a region of at least about 100 residues, and most preferably, the sequences are substantially identical over at least about 150 residues, or over the full length of the two sequences to be compared.

[0366] Proteins and/or protein sequences are “homologous” when they are derived, naturally or artificially, from a common ancestral protein or protein sequence. Similarly, nucleic acids and/or nucleic acid sequences are homologous when they are derived, naturally or artificially, from a common ancestral nucleic acid or nucleic acid sequence. Homology is generally inferred from sequence similarity between two or more nucleic acids or proteins (or sequences thereof). The precise percentage of similarity between sequences that is useful in establishing homology varies with the nucleic acid and protein at issue, but as little as 25% sequence similarity over 50, 100, 150 or more residues is routinely used to establish homology. Higher levels of sequence similarity, e.g., 30%, 40%, 50%, 60%, 70%, 80%, 90%, 95%, or 99% or more identity, can also be used to establish homology. Methods for determining sequence similarity percentages (e.g., BLASTP and BLASTN using default parameters) are described herein and are generally available.

[0367] For sequence comparison and homology determination, typically one sequence acts as a reference sequence to which test sequences are compared. When using a sequence comparison algorithm, test and reference sequences are input into a computer, subsequence coordinates are designated, if necessary, and sequence algorithm program parameters are designated. The sequence comparison algorithm then calculates the percent sequence identity for the test sequence(s) relative to the reference sequence, based on the designated program parameters.

[0368] Optimal alignment of sequences for comparison can be conducted, e.g., by the local homology algorithm of Smith & Waterman, Adv. Appl. Math. 2:482 (1981), by the homology alignment algorithm of Needleman & Wunsch, J. Mol. Biol. 48:443 (1970), by the search for similarity method of Pearson & Lipman, Proc. Nat'l. Acad. Sci. USA 85:2444 (1988), by computerized implementations of these algorithms (GAP, BESTFIT, FASTA, and TFASTA in the Wisconsin Genetics Software Package, Genetics Computer Group, 575 Science Dr., Madison, Wis.), or by visual inspection (see generally Current Protocols in Molecular Biology, Ausubel et al., eds., Current Protocols, a joint venture between Greene Publishing Associates, Inc. and John Wiley & Sons, Inc., supplemented through 2011).

[0369] One example of an algorithm that is suitable for determining percent sequence identity and sequence similarity is the BLAST algorithm, which is described in Altschul et al., J. Mol. Biol. 215:403-410 (1990). Software for performing BLAST analyses is publicly available through the National Center for Biotechnology Information. This algorithm involves first identifying high scoring sequence pairs (HSPs) by identifying short words of length W in the query sequence, which either match or satisfy some positive-valued threshold score T when aligned with a word of the same length in a database sequence. T is referred to as the neighborhood word score threshold (Altschul et al., supra). These initial neighborhood word hits act as seeds for initiating searches to find longer HSPs containing them. The word hits are then extended in both directions along each sequence for as far as the cumulative alignment score can be increased. Cumulative scores are calculated using, for nucleotide sequences, the parameters M (reward score for a pair of matching residues; always >0) and N (penalty score for mismatching residues; always <0). For amino acid sequences, a scoring matrix is used to calculate the cumulative score. Extension of the word hits in each direction are halted when: the cumulative alignment score falls off by the quantity X from its maximum achieved value; the cumulative score goes to zero or below, due to the accumulation of one or more negative-scoring residue alignments; or the end of either sequence is reached. The BLAST algorithm parameters W, T, and X determine the sensitivity and speed of the alignment. The BLASTN program (for nucleotide sequences) uses as defaults a wordlength (W) of 11, an expectation (E) of 10, a cutoff of 100, M=5, N=−4, and a comparison of both strands. For amino acid sequences, the BLASTP program uses as defaults a wordlength (W) of 3, an expectation (E) of 10, and the BLOSUM62 scoring matrix (see Henikoff & Henikoff (1989) Proc. Natl. Acad. Sci. USA 89:10915).

[0370] In addition to calculating percent sequence identity, the BLAST algorithm also performs a statistical analysis of the similarity between two sequences (see, e.g., Karlin & Altschul (1993) Proc. Nat'l. Acad. Sci. USA 90:5873-5787). One measure of similarity provided by the BLAST algorithm is the smallest sum probability (P(N)), which provides an indication of the probability by which a match between two nucleotide or amino acid sequences would occur by chance. For example, a nucleic acid is considered similar to a reference sequence if the smallest sum probability in a comparison of the test nucleic acid to the reference nucleic acid is less than about 0.1, more preferably less than about 0.01, and most preferably less than about 0.001.

[0371] For reference, the amino acid sequence of a wild-type Φ29 polymerase is presented in Table 12, along with the sequences of several other wild-type Φ29-type polymerases.

TABLE 12
Amino acid sequence of exemplary wild-type Φ29-type polymerases.

| | |
|---|---|
| Φ29 | MKHMPRKMYSCDFETTTKVEDCRVWAYGYMNIEDHSEYKIGNSLDEFMA |
| SEQ ID NO: 1 | WVLKVQADLYFHLKFDGAFIINWLERNGFKWSADGLPNTYNTIISRMGQW |
| | YMIDICLGYKGKRKIHTVIYDSLKKLPFPVKKIAKDFKLTVLKGDIDYHKERPV |
| | GYKITPEEYAYIKNDIQIIAEALLIQFKQGLDRMTAGSDSLKGFKDIITTKKFKK |
| | VFPTLSLGLDKEVRYAYRGGFTWLNDRFKEKEIGEGMVFDVNSLYPAQMY |
| | SRLLPYGEPIVFEGKYVWDEDYPLHIQHIRCEFELKEGYIPTIQIKRSRFYKG |
| | NEYLKSSGGEIADLWLSNVDLELMKEHYDLYNVEYISGLKFKATTGLFKDFI |
| | DKWTYIKTTSEGAIKQLAKLMLNSLYGKFASNPDVTGKVPYLKENGALGFR |
| | LGEEETKDPVYTPMGVFITAWARYTTITAAQACYDRIIYCDTDSIHLTGTEIP |
| | DVIKDIVDPKKLGYWAHESTFKRAKYLRQKTYIQDIYMKEVDGKLVEGSPD |
| | DYTDIKFSVKCAGMTDKIKKEVTFENFKVGFSRKMKPKPVQVPGGVVLVD |
| | DTFTIK |
| M2Y | MSRKMFSCDFETTTKLDDCRVWAYGYMEIGNLDNYKIGNSLDEFMQWVM |
| SEQ ID NO: 2 | EIQADLYFHNLKFDGAFIVNWLEQHGFKWSNEGLPNTYNTIISKMGQWYMI |
| | DICFGYKGKRKLHTVIYDSLKKLPFPVKKIAKDFQLPLLKGDIDYHTERPVGH |
| | EITPEEYEYIKNDIEIIARALDIQFKQGLDRMTAGSDSLKGFKDILSTKKFNKV |
| | FPKLSLPMDKEIRKAYRGGFTWLNDKYKEKEIGEGMVFDVNSLYPSQMYS |
| | RPLPYGAPIVFQGKYEKDEQYPLYIQRIRFEFELKEGYIPTIQIKKNPFFKGN |
| | EYLKNSGVEPVELYLTNVDLELIQEHYELYNVEYIDGFKFREKTGLFKDFIDK |
| | WTYVKTHEEGAKKQLAKLMLNSLYGKFASNPDVTGKVPYLKDDGSLGFRV |
| | GDEEYKDPVYTPMGVFITAWARFTTITAAQACYDRIIYCDTDSIHLTGTEVP |
| | EIIKDIVDPKKLGYWAHESTFKRAKYLRQKTYIQDIYVKEVDGKLKECSPDE |
| | ATTTKFSVKCAGMTDTIKKKVTFDNFAVGFSSMGKPKPVQVNGGVVLVDS |
| | VFTIK |
| B103 | MPRKMFSCDFETTTKLDDCRVWAYGYMEIGNLDNYKIGNSLDEFMQWVM |
| SEQ ID NO: 3 | EIQADLYFHNLKFDGAFIVNWLEHHGFKWSNEGLPNTYNTIISKMGQWYMI |
| | DICFGYKGKRKLHTVIYDSLKKLPFPVKKIAKDFQLPLLKGDIDYHAERPVG |
| | HEITPEEYEYIKNDIEIIARALDIQFKQGLDRMTAGSDSLKGFKDILSTKKFNK |
| | VFPKLSLPMDKEIRRAYRGGFTWLNDKYKEKEIGEGMVFDVNSLYPSQMY |
| | SRPLPYGAPIVFQGKYEKDEQYPLYIQRIRFEFELKEGYIPTIQIKKNPFFKG |
| | NEYLKNSGAEPVELYLTNVDLELIQEHYEMYNVEYIDGFKFREKTGLFKEFI |
| | DKWTYVKTHEKGAKKQLAKLMFDSLYGKFASNPDVTGKVPYLKEDGSLGF |
| | RVGDEEYKDPVYTPMGVFITAWARFTTITAAQACYDRIIYCDTDSIHLTGTE |
| | VPEIIKDIVDPKKLGYWAHESTFKRAKYLRQKTYIQDIYAKEVDGKLIECSPD |
| | EATTTKFSVKCAGMTDTIKKKVTFDNFRVGFSSTGKPKPVQVNGGVVLVD |
| | SVFTIK |
| GA-1 | MARSVYVCDFETTTDPEDCRLWAWGWMDIYNTDKWSYGEDIDSFMEWA |
| SEQ ID NO: 4 | LNSNSDIYFHNLKFDGSFILPWWLRNGYVHTEEDRTNTPKEFTTTISGMGQ |
| | WYAVDVCINTRGKNKNHVVFYDSLKKLPFKVEQIAKGFGLPVLKGDIDYKK |
| | YRPVGYVMDDNEIEYLKHDLLIVALALRSMFDNDFTSMTVGSDALNTYKEM |
| | LGVKQWEKYFPVLSLKVNSEIRKAYKGGFTWVNPKYQGETVYGGMVFDV |
| | NSMYPAMMKNKLLPYGEPVMFKGEYKKNVEYPLYIQQVRCFFELKKDKIP |
| | CIQIKGNARFGQNEYLSTSGDEYVDLYVTNVDWELIKKHYDIFEEEFIGGFM |
| | FKGFIGFFDEYIDRFMEIKNSPDSSAEQSLQAKLMLNSLYGKFATNPDITGK |
| | VPYLDENGVLKFRKGELKERDPVYTPMGCFITAYARENILSNAQKLYPRFIY |
| | ADTDSIHVEGLGEVDAIKDVIDPKKLGYWDHEATFQRARYVRQKTYFIETT |
| | WKENDKGKLVVCEPQDATKVKPKIACAGMSDAIKERIRFNEFKIGYSTHGS |
| | LKPKNVLGGVVLMDYPFAIK |
| AV-1 | MVRQSTIASPARGGVRRSHKKVPSFCADFETTTDEDDCRVWSWGIIQVGK |
| SEQ ID NO: 5 | LQNYVDGISLDGFMSHISERASHIYFHNLAFDGTFILDWLLKHGYRWTKEN |
| | PGVKEFTSLISRMGKYYSITVVFETGFRVEFRDSFKKLPMSVSAIAKAFNLH |
| | DQKLEIDYEKPRPIGYIPTEQEKRYQRNDVAIVAQALEVQFAEKMTKLTAGS |
| | DSLATYKKMTGKLFIRRFPILSPEIDTEIRKAYRGGFTYADPRYAKKLNGKG |
| | SVYDVNSLYPSVMRTALLPYGEPIYSEGAPRTNRPLYIASITFTAKLKPNHIP |
| | CIQIKKNLSFNPTQYLEEVKEPTTVVATNIDIELWKKHYDFKIYSWNGTFEFR |
| | GSHGFFDTYVDHFMEIKKNSTGGLRQIAKLHLNSLYGKFATNPDITGKHPTL |
| | KDNRVSLVMNEPETRDPVYTPMGVFITAYARKKTISAAQDNYETFAYADTD |
| | SLHLIGPTTPPDSLWVDPVELGAWKHESSFTKSVYIRAKQYAEEIGGKLDV |
| | HIAGMPRNVAATLTLEDMLHGGTWNGKLIPVRVPGGTVLKDTTFTLKID |
| CP-1 | MTCYYAGDFETTTNEEETEVWLSCFAKVIDYDKLDTFKVNTSLEDFLKSLY |
| SEQ ID NO: 6 | LDLDKTYTETGEDEFIIFFHNLKFDGSFLLSFFLNNDIECTYFINDMGVWYSI |
| | TLEFPDFTLTFRDSLKILNFSIATMAGLFKMPIAKGTTPLLKHKPEVIKPEWID |
| | YIHVDVAILARGIFAMYYEENFTKYTSASEALTEFKRIFRKSKRKFRDFFPILD |
| | EKVDDFCRKHIVGAGRLPTLKHRGRTLNQLIDIYDINSMYPATMLQNALPIGI |
| | PKRYKGKPKEIKEDHYYIYHIKADFDLKRGYLPTIQIKKKLDALRIGVRTSDY |
| | VTTSKNEVIDLYLTNFDLDLFLKHYDATIMYVETLEFQTESDLFDDYITTYRY |
| | KKENAQSPAEKQKAKIMLNSLYGKFGAKIISVKKLAYLDDKGILRFKNDDEE |
| | EVQPVYAPVALFVTSIARHFIISNAQENYDNFLYADTDSLHLFHSDSLVLDID |
| | PSEFGKWAHEGRAVKAKYLRSKLYIEELIQEDGTTHLDVKGAGMTPEIKEKI |
| | TFENFVIGATFEGKRASKQIKGGTLIYETTFKIRETDYLV |

### Exemplary Mutation Combinations

[0372] A list of exemplary polymerase mutation combinations, and optional corresponding exogenous or heterologous features at the N- and/or C-terminal region of the polymerase, is provided in Table 13. Positions of amino acid substitutions and/or insertions are identified relative to a wild-type Φ29 DNA polymerase (SEQ ID NO:1). Polymerases of the invention (including those provided in Table 13) can include any exogenous or heterologous feature (or combination of such features) at the N- and/or C-terminal region. For example, it will be understood that polymerase mutants in Table 13 that do not include, e.g., a C-terminal polyhistidine tag can be modified to include a polyhistidine tag at the C-terminal region, alone or in combination with any of the exogenous or heterologous features described herein. Similarly, some or all of the exogenous features listed in Table 13 can be omitted and still result in a polymerase of the invention. Certain features are followed by “co”, meaning that the codon encoding that amino acid is optimized for expression in a bacterial cell.

[0373] As will be appreciated, “mutations” with respect to Table 13 and any of the polymerases provided herein can comprise one or more amino acid substitutions, deletions, insertions, and the like. Accordingly, certain mutation combinations provided in Table 13 and elsewhere herein include one or more amino acid insertions. For example, “511.1K 511.2S” indicates the insertion of a lysine residue and a serine residue between positions 511 and 512 relative to a wild-type Φ29 DNA polymerase (SEQ ID NO:1), where the lysine immediately follows position 511 and the serine immediately follows the inserted lysine, etc.

TABLE 13

| N-terminal region | | C-terminal region |
|---|---|---|
| feature(s) | Mutations | feature(s) |
| Btag-His10-Xa | N62D E375Y K512Y | |
| Btag-His10-Xa | N62D T368F E375Y K512Y | |
| Btag.co-His10.co- | N62D T368F E375Y K512Y | |
| Xa.co | | |
| Btag.co-His10.co- | T368F E375Y K512Y | |
| Xa.co. | | |
| Btagco-His10co. | N62D L253A E375Y A484E K512Y | |
| Btagco-His10co. | N62D L253A E375Y K512Y | |
| Btag-His10. | N62D T368F E375Y A484E K512Y.co | His10 |
| Btag-His10-Xa. | N62D T368F E375Y A484E K512Y | |
| Btagco.His10co. | N62D L253A E375Y A484E K512Y.co | His10 |
| Btagco.His10co. | N62D L253A E375Y A484E K512Y.co | 1942Linkco_Ala10co |
| Btagco.His10co | N62D H149M T368F E375Y D510M K512Y D523M.co | |
| Btagco.His10co | N62H E375Y A484E E508R K512Y.co | His10 |
| Btagco.His10co | D12R N62H T368F E375Y A484E K512Y.co | His10 |
| Btagco.His10co. | D12R T368F E375Y A484E E508R 511.1K 511.2S | His10 |
| | 512.1G 512.2S.co | |
| Btagco.His10co. | D12R T368F E375Y I378W A484E E508R 511.1K | His10 |
| | 511.2S 512.1G 512.2S.co | |
| Btagco.His10co | Y148A E375Y A484E K512Y.co | |
| Btagco.His10co. | N62D A190E E375Y K422A A484E E508R K512Y.co | |
| Btagco.His10co. | N62D I93Y T368F T372Y E375Y I378W K478Y A484E | His10 |
| | E508R 511.1K 511.2S K512Y 512.1G 512.2S.co | |
| Btagco-His10co. | N62D T368F E375Y P477Q A484E K512Y | |
| Btagco.His10co. | N62D T368F E375Y L384M A484E K512Y.co | |
| Btag.co-His10.co- | T368F E375Y P477E K512Y | |
| Xa.co. | | |
| Btagco-His10co. | A176V T368F E375Y K512Y | |
| Btagco.His10co. | T368F E375Y K422R K512Y | |
| Btagco.His10co. | N62D E375Y P477Q A484E K512Y.co | |
| Btag.co-His10.co- | I93F T368F E375Y A484E K512Y | |
| Xa.co. | | |
| Btagco.His10co. | L253A E375Y A484E K512Y.co | |
| Btagco.His10co. | N62D L253A E375Y E420M A484E K512Y.co | |
| Btagco.His10co. | N62D L253A E375Y K422A A484E K512Y.co | |
| Btagco.His10co. | N62D L253A E375Y A484E E508K K512Y.co | |
| Btagco.His10co. | N62D S215D L253A E375Y A484E K512Y.co | |
| Btagco.His10co. | N62D L253T E375Y A484E K512Y.co | |
| Btagco.His10co. | N62D L253A Y369H E375Y A484E K512Y.co | |
| Btagco.His10co. | N62D L253A Y369G E375Y A484E K512Y.co | |
| Btagco.His10co. | N62D L253A Y369L E375Y A484E K512Y.co | |
| Btagco.His10co. | N62D L253A E375F A484E K512Y.co | |
| Btagco.His10co. | D66R L253A E375Y A484E K512Y.co | |
| Btagco.His10co. | N62D L253A E375Y A484E I504R K512Y.co | |
| Btagco.His10co. | N62D L253A E375Y A484E D510K K512Y.co | |
| Btagco.His10co. | L253A_E375Y_A484E_K512Y.co | His10co |
| BtagV7co.His10co. | L253A_E375Y_A484E_K512Y.co | His10co |
| Btagco.His10co. | L253A E375Y A484E E508R K512Y.co | His10co |

[0374] The amino acid sequences of recombinant Φ29 polymerases harboring the exemplary mutation combinations of Table 13 are provided in Tables 14 and 15. Table 14 includes the polymerase portion of the molecule as well as the one or more exogenous features at the N- and/or C-terminal region of the polymerase, while Table 15 includes the amino acid sequence of the polymerase portion only.

TABLE 14

| | |
|---|---|
| SEQ ID NO | Amino Acid Sequence |

| | |
|---|---|
| 51 | MSVDGLNDIFEAQKIEWHEAMGHHHHHHHHHHSSG |
| phi29co.Btag-His10- | HIEGRHMKHMPRKMYSCDFETTTKVEDCRVWAYG |
| Xa.N62D_E375Y_K512Y. | YMNIEDHSEYKIGNSLDEFMAWVLKVQADLYFHDL |
| | KFDGAFIINWLERNGFKWSADGLPNTYNTIISRMGQ |
| | WYMIDICLGYKGKRKIHTVIYDSLKKLPFPVKKIAKD |
| | FKLTVLKGDIDYHKERPVGYKITPEEYAYIKNDIQIIA |
| | EALLIQFKQGLDRMTAGSDSLKGFKDIITTKKFKKVF |
| | PTLSLGLDKEVRYAYRGGFTWLNDRFKEKEIGEGMV |
| | FDVNSLYPAQMYSRLLPYGEPIVFEGKYVWDEDYPL |
| | HIQHIRCEFELKEGYIPTIQIKRSRF |
| | YKGNEYLKSSGGEIADLWLSNVDLELMKEHYDLYN |
| | VEYISGLKFKATTGLFKDFIDKWTYIKTTSYGAIKQL |
| | AKLMLNSLYGKFASNPDVTGKVPYLKENGALGFRL |
| | GEEETKDPVYTPMGVFITAWARYTTITAAQACYDRII |
| | YCDTDSIHLTGTEIPDVIKDIVDPKKLGYWAHESTFK |
| | RAKYLRQKTYIQDIYMKEVDGYLVEGSPDDYTDIKF |
| | SVKCAGMTDKIKKEVTFENFKVGFSRKMKPKPVQVP |
| | GGVVLVDDTFTIK |
| 52 | MSVDGLNDIFEAQKIEWHEAMGHHHHHHHHHHSSG |
| phi29co.Btag-His10- | HIEGRHMKHMPRKMYSCDFETTTKVEDCRVWAYG |
| Xa.N62D_T368F_E375Y_K512Y. | YMNIEDHSEYKIGNSLDEFMAWVLKVQADLYFHDL |
| | KFDGAFIINWLERNGFKWSADGLPNTYNTIISRMGQ |
| | WYMIDICLGYKGKRKIHTVIYDSLKKLPFPVKKIAKD |
| | FKLTVLKGDIDYHKERPVGYKITPEEYAYIKNDIQIIA |
| | EALLIQFKQGLDRMTAGSDSLKGFKDIITTKKFKKVF |
| | PTLSLGLDKEVRYAYRGGFTWLNDRFKEKEIGEGMV |
| | FDVNSLYPAQMYSRLLPYGEPIVFEGKYVWDEDYPL |
| | HIQHIRCEFELKEGYIPTIQIKRSRF |
| | YKGNEYLKSSGGEIADLWLSNVDLELMKEHYDLYN |
| | VEYISGLKFKATTGLFKDFIDKWFYIKTTSYGAIKQL |
| | AKLMLNSLYGKFASNPDVTGKVPYLKENGALGFRL |
| | GEEETKDPVYTPMGVFITAWARYTTITAAQACYDRII |
| | YCDTDSIHLTGTEIPDVIKDIVDPKKLGYWAHESTFK |
| | RAKYLRQKTYIQDIYMKEVDGYLVEGSPDDYTDIKF |
| | SVKCAGMTDKIKKEVTFENFKVGFSRKMKPKPVQVP |
| | GGVVLVDDTFTIK |
| 53 | MSVDGLNDIFEAQKIEWHEAMGHHHHHHHHHHSSG |
| phi29co.Btagco-His10co- | HIEGRHMKHMPRKMYSCDFETTTKVEDCRVWAYG |
| Xaco.N62D_T368F_E375Y_K512Y. | YMNIEDHSEYKIGNSLDEFMAWVLKVQADLYFHDL |
| | KFDGAFIINWLERNGFKWSADGLPNTYNTIISRMGQ |
| | WYMIDICLGYKGKRKIHTVIYDSLKKLPFPVKKIAKD |
| | FKLTVLKGDIDYHKERPVGYKITPEEYAYIKNDIQIIA |
| | EALLIQFKQGLDRMTAGSDSLKGFKDIITTKKFKKVF |
| | PTLSLGLDKEVRYAYRGGFTWLNDRFKEKEIGEGMV |
| | FDVNSLYPAQMYSRLLPYGEPIVFEGKYVWDEDYPL |
| | HIQHIRCEFELKEGYIPTIQIKRSRF |
| | YKGNEYLKSSGGEIADLWLSNVDLELMKEHYDLYN |
| | VEYISGLKFKATTGLFKDFIDKWFYIKTTSYGAIKQL |
| | AKLMLNSLYGKFASNPDVTGKVPYLKENGALGFRL |
| | GEEETKDPVYTPMGVFITAWARYTTITAAQACYDRII |
| | YCDTDSIHLTGTEIPDVIKDIVDPKKLGYWAHESTFK |
| | RAKYLRQKTYIQDIYMKEVDGYLVEGSPDDYTDIKF |
| | SVKCAGMTDKIKKEVTFENFKVGFSRKMKPKPVQVP |
| | GGVVLVDDTFTIK |
| 54 | MSVDGLNDIFEAQKIEWHEAMGHHHHHHHHHHSSG |
| phi29co.Btagco-His10co- | HIEGRHMKHMPRKMYSCDFETTTKVEDCRVWAYG |
| Xaco.T368F_E375Y_K512Y. | YMNIEDHSEYKIGNSLDEFMAWVLKVQADLYFHNL |
| | KFDGAFIINWLERNGFKWSADGLPNTYNTIISRMGQ |
| | WYMIDICLGYKGKRKIHTVIYDSLKKLPFPVKKIAKD |
| | FKLTVLKGDIDYHKERPVGYKITPEEYAYIKNDIQIIA |
| | EALLIQFKQGLDRMTAGSDSLKGFKDIITTKKFKKVF |
| | PTLSLGLDKEVRYAYRGGFTWLNDRFKEKEIGEGMV |
| | FDVNSLYPAQMYSRLLPYGEPIVFEGKYVWDEDYPL |
| | HIQHIRCEFELKEGYIPTIQIKRSRF |
| | YKGNEYLKSSGGEIADLWLSNVDLELMKEHYDLYN |
| | VEYISGLKFKATTGLFKDFIDKWFYIKTTSYGAIKQL |
| | AKLMLNSLYGKFASNPDVTGKVPYLKENGALGFRL |
| | GEEETKDPVYTPMGVFITAWARYTTITAAQACYDRII |
| | YCDTDSIHLTGTEIPDVIKDIVDPKKLGYWAHESTFK |
| | RAKYLRQKTYIQDIYMKEVDGYLVEGSPDDYTDIKF |
| | SVKCAGMTDKIKKEVTFENFKVGFSRKMKPKPVQVP |
| | GGVVLVDDTFTIK |
| 55 | MSVDGLNDIFEAQKIEWHEAMGHHHHHHHHHHSSG |
| phi29co. Btagco-His10co- | HIEGRHMKHMPRKMYSCDFETTTKVEDCRVWAYG |
| Xaco.N62D_L253A_E375Y_A484E_K512Y. | YMNIEDHSEYKIGNSLDEFMAWVLKVQADLYFHDL |
| | KFDGAFIINWLERNGFKWSADGLPNTYNTIISRMGQ |
| | WYMIDICLGYKGKRKIHTVIYDSLKKLPFPVKKIAKD |
| | FKLTVLKGDIDYHKERPVGYKITPEEYAYIKNDIQIIA |
| | EALLIQFKQGLDRMTAGSDSLKGFKDIITTKKFKKVF |
| | PTLSLGLDKEVRYAYRGGFTWLNDRFKEKEIGEGMV |
| | FDVNSAYPAQMYSRLLPYGEPIVFEGKYVWDEDYPL |
| | HIQHIRCEFELKEGYIPTIQIKRSRFYKGNEYLKSSGGE |
| | IADLWLSNVDLELMKEHYDLYNVEYISGLKFKATTG |
| | LFKDFIDKWTYIKTTSYGAIKQLAKLMLNSLYGKFAS |
| | NPDVTGKVPYLKENGALGFRLGEEETKDPVYTPMG |
| | VFITAWARYTTITAAQACYDRIIYCDTDSIHLTGTEIP |
| | DVIKDIVDPKKLGYWEHESTFKRAKYLRQKTYIQDIY |
| | MKEVDGYLVEGSPDDYTDIKFSVKCAGMTDKIKKE |
| | VTFENFKVGFSRKMKPKPVQVPGGVVLVDDTFTIK |
| 56 | MSVDGLNDIFEAQKIEWHEAMGHHHHHHHHHHSSG |
| phi29co. Btagco-His10co- | HIEGRHMKHMPRKMYSCDFETTTKVEDCRVWAYG |
| Xaco.N62D_L253A_E375Y_K512Y. | YMNIEDHSEYKIGNSLDEFMAWVLKVQADLYFHDL |
| | KFDGAFIINWLERNGFKWSADGLPNTYNTIISRMGQ |
| | WYMIDICLGYKGKRKIHTVIYDSLKKLPFPVKKIAKD |
| | FKLTVLKGDIDYHKERPVGYKITPEEYAYIKNDIQIIA |
| | EALLIQFKQGLDRMTAGSDSLKGFKDIITTKKFKKVF |
| | PTLSLGLDKEVRYAYRGGFTWLNDRFKEKEIGEGMV |
| | FDVNSAYPAQMYSRLLPYGEPIVFEGKYVWDEDYPL |
| | HIQHIRCEFELKEGYIPTIQIKRSRFYKGNEYLKSSGGE |
| | IADLWLSNVDLELMKEHYDLYNVEYISGLKFKATTG |
| | LFKDFIDKWTYIKTTSYGAIKQLAKLMLNSLYGKFAS |
| | NPDVTGKVPYLKENGALGFRLGEEETKDPVYTPMG |
| | VFITAWARYTTITAAQACYDRIIYCDTDSIHLTGTEIP |
| | DVIKDIVDPKKLGYWAHESTFKRAKYLRQKTYIQDI |
| | YMKEVDGYLVEGSPDDYTDIKFSVKCAGMTDKIKK |
| | EVTFENFKVGFSRKMKPKPVQVPGGVVLVDDTFTIK |
| 57 | MSVDGLNDIFEAQKIEWHEAMGHHHHHHHHHHSSG |
| pET16.Btag.His10.Cterm_His10.Phi29.- | HIEGRHMKHMPRKMYSCDFETTTKVEDCRVWAYG |
| N62D_T368F_E375Y_A484E_K512Y.co | YMNIEDHSEYKIGNSLDEFMAWVLKVQADLYFHDL |
| | KFDGAFIINWLERNGFKWSADGLPNTYNTIISRMGQ |
| | WYMIDICLGYKGKRKIHTVIYDSLKKLPFPVKKIAKD |
| | FKLTVLKGDIDYHKERPVGYKITPEEYAYIKNDIQIIA |
| | EALLIQFKQGLDRMTAGSDSLKGFKDIITTKKFKKVF |
| | PTLSLGLDKEVRYAYRGGFTWLNDRFKEKEIGEGMV |
| | FDVNSLYPAQMYSRLLPYGEPIVFEGKYVWDEDYPL |
| | HIQHIRCEFELKEGYIPTIQIKRSRFYKGNEYLKSSGGE |
| | IADLWLSNVDLELMKEHYDLYNVEYISGLKFKATTG |
| | LFKDFIDKWFYIKTTSYGAIKQLAKLMLNSLYGKFAS |
| | NPDVTGKVPYLKENGALGFRLGEEETKDPVYTPMG |
| | VFITAWARYTTITAAQACYDRIIYCDTDSIHLTGTEIP |
| | DVIKDIVDPKKLGYWEHESTFKRAKYLRQKTYIQDIY |
| | MKEVDGYLVEGSPDDYTDIKFSVKCAGMTDKIKKE |
| | VTFENFKVGFSRKMKPKPVQVPGGVVLVDDTFTIKG |
| | HHHHHHHHHH |
| 58 | MSVDGLNDIFEAQKIEWHEAMGHHHHHHHHHHSSG |
| phi29co.Btag-His10- | HIEGRHMKHMPRKMYSCDFETTTKVEDCRVWAYG |
| Xa.N62D_T368F_E375Y_A484E_K512Y. | YMNIEDHSEYKIGNSLDEFMAWVLKVQADLYFHDL |
| | KFDGAFIINWLERNGFKWSADGLPNTYNTIISRMGQ |
| | WYMIDICLGYKGKRKIHTVIYDSLKKLPFPVKKIAKD |
| | FKLTVLKGDIDYHKERPVGYKITPEEYAYIKNDIQIIA |
| | EALLIQFKQGLDRMTAGSDSLKGFKDIITTKKFKKVF |
| | PTLSLGLDKEVRYAYRGGFTWLNDRFKEKEIGEGMV |
| | FDVNSLYPAQMYSRLLPYGEPIVFEGKYVWDEDYPL |
| | HIQHIRCEFELKEGYIPTIQIKRSRFYKGNEYLKSSGGE |
| | IADLWLSNVDLELMKEHYDLYNVEYISGLKFKATTG |
| | LFKDFIDKWFYIKTTSYGAIKQLAKLMLNSLYGKFAS |
| | NPDVTGKVPYLKENGALGFRLGEEETKDPVYTPMG |
| | VFITAWARYTTITAAQACYDRIIYCDTDSIHLTGTEIP |
| | DVIKDIVDPKKLGYWEHESTFKRAKYLRQKTYIQDIY |
| | MKEVDGYLVEGSPDDYTDIKFSVKCAGMTDKIKKE |
| | VTFENFKVGFSRKMKPKPVQVPGGVVLVDDTFTIK |
| 59 | MSVDGLNDIFEAQKIEWHEAMGHHHHHHHHHHSSG |
| pET16.Btagco.His10co.Cterm_His10.Phi29.- | HIEGRHMKHMPRKMYSCDFETTTKVEDCRVWAYG |
| N62D_L253A_E375Y_A484E_K512Y.co | YMNIEDHSEYKIGNSLDEFMAWVLKVQADLYFHDL |
| | KFDGAFIINWLERNGFKWSADGLPNTYNTIISRMGQ |
| | WYMIDICLGYKGKRKIHTVIYDSLKKLPFPVKKIAKD |
| | FKLTVLKGDIDYHKERPVGYKITPEEYAYIKNDIQIIA |
| | EALLIQFKQGLDRMTAGSDSLKGFKDIITTKKFKKVF |
| | PTLSLGLDKEVRYAYRGGFTWLNDRFKEKEIGEGMV |
| | FDVNSAYPAQMYSRLLPYGEPIVFEGKYVWDEDYPL |
| | HIQHIRCEFELKEGYIPTIQIKRSRFYKGNEYLKSSGGE |
| | IADLWLSNVDLELMKEHYDLYNVEYISGLKFKATTG |
| | LFKDFIDKWTYIKTTSYGAIKQLAKLMLNSLYGKFAS |
| | NPDVTGKVPYLKENGALGFRLGEEETKDPVYTPMG |
| | VFITAWARYTTITAAQACYDRIIYCDTDSIHLTGTEIP |
| | DVIKDIVDPKKLGYWEHESTFKRAKYLRQKTYIQDIY |
| | MKEVDGYLVEGSPDDYTDIKFSVKCAGMTDKIKKE |
| | VTFENFKVGFSRKMKPKPVQVPGGVVLVDDTFTIKG |
| | HHHHHHHHHH |
| 60 | MSVDGLNDIFEAQKIEWHEAMGHHHHHHHHHHSSG |
| pET16.Btagco.His10co.- | HIEGRHMKHMPRKMYSCDFETTTKVEDCRVWAYG |
| CTerm_1942Linkco_Ala10co.Phi29.N62D_L253A_E375Y_A484E_K512Y.co | YMNIEDHSEYKIGNSLDEFMAWVLKVQADLYFHDL |
| | KFDGAFIINWLERNGFKWSADGLPNTYNTIISRMGQ |
| | WYMIDICLGYKGKRKIHTVIYDSLKKLPFPVKKIAKD |
| | FKLTVLKGDIDYHKERPVGYKITPEEYAYIKNDIQIIA |
| | EALLIQFKQGLDRMTAGSDSLKGFKDIITTKKFKKVF |
| | PTLSLGLDKEVRYAYRGGFTWLNDRFKEKEIGEGMV |
| | FDVNSAYPAQMYSRLLPYGEPIVFEGKYVWDEDYPL |
| | HIQHIRCEFELKEGYIPTIQIKRSRFYKGNEYLKSSGGE |
| | IADLWLSNVDLELMKEHYDLYNVEYISGLKFKATTG |
| | LFKDFIDKWTYIKTTSYGAIKQLAKLMLNSLYGKFAS |
| | NPDVTGKVPYLKENGALGFRLGEEETKDPVYTPMG |
| | VFITAWARYTTITAAQACYDRIIYCDTDSIHLTGTEIP |
| | DVIKDIVDPKKLGYWEHESTFKRAKYLRQKTYIQDIY |
| | MKEVDGYLVEGSPDDYTDIKFSVKCAGMTDKIKKE |
| | VTFENFKVGFSRKMKPKPVQVPGGVVLVDDTFTIKG |
| | GSGGGLGGGLGGAAAAAAAAAA |
| 61 | MSVDGLNDIFEAQKIEWHEAMGHHHHHHHHHHSSG |
| pET16.Btagco.His10co.Phi29.- | HIEGRHMKHMPRKMYSCDFETTTKVEDCRVWAYG |
| N62D_H149M_T368F_E375Y_D510M_K512Y_D523M.- | YMNIEDHSEYKIGNSLDEFMAWVLKVQADLYFHDL |
| co | KFDGAFIINWLERNGFKWSADGLPNTYNTIISRMGQ |
| | WYMIDICLGYKGKRKIHTVIYDSLKKLPFPVKKIAKD |
| | FKLTVLKGDIDYMKERPVGYKITPEEYAYIKNDIQIIA |
| | EALLIQFKQGLDRMTAGSDSLKGFKDIITTKKFKKVF |
| | PTLSLGLDKEVRYAYRGGFTWLNDRFKEKEIGEGMV |
| | FDVNSLYPAQMYSRLLPYGEPIVFEGKYVWDEDYPL |
| | HIQHIRCEFELKEGYIPTIQIKRSRFYKGNEYLKSSGGE |
| | IADLWLSNVDLELMKEHYDLYNVEYISGLKFKATTG |
| | LFKDFIDKWFYIKTTSYGAIKQLAKLMLNSLYGKFAS |
| | NPDVTGKVPYLKENGALGFRLGEEETKDPVYTPMG |
| | VFITAWARYTTITAAQACYDRIIYCDTDSIHLTGTEIP |
| | DVIKDIVDPKKLGYWAHESTFKRAKYLRQKTYIQDI |
| | YMKEVMGYLVEGSPDDYTMIKFSVKCAGMTDKIKK |
| | EVTFENFKVGFSRKMKPKPVQVPGGVVLVDDTFTIK |
| 62 | MSVDGLNDIFEAQKIEWHEAMGHHHHHHHHHHSSG |
| pET16.Btagco.His10co.CTerm_His10.Phi29.- | HIEGRHMKHMPRKMYSCDFETTTKVEDCRVWAYG |
| N62H_E375Y_A484E_E508R_K512Y.co | YMNIEDHSEYKIGNSLDEFMAWVLKVQADLYFHHL |
| | KFDGAFIINWLERNGFKWSADGLPNTYNTIISRMGQ |
| | WYMIDICLGYKGKRKIHTVIYDSLKKLPFPVKKIAKD |
| | FKLTVLKGDIDYHKERPVGYKITPEEYAYIKNDIQIIA |
| | EALLIQFKQGLDRMTAGSDSLKGFKDIITTKKFKKVF |
| | PTLSLGLDKEVRYAYRGGFTWLNDRFKEKEIGEGMV |
| | FDVNSLYPAQMYSRLLPYGEPIVFEGKYVWDEDYPL |
| | HIQHIRCEFELKEGYIPTIQIKRSRFYKGNEYLKSSGGE |
| | IADLWLSNVDLELMKEHYDLYNVEYISGLKFKATTG |
| | LFKDFIDKWTYIKTTSYGAIKQLAKLMLNSLYGKFAS |
| | NPDVTGKVPYLKENGALGFRLGEEETKDPVYTPMG |
| | VFITAWARYTTITAAQACYDRIIYCDTDSIHLTGTEIP |
| | DVIKDIVDPKKLGYWEHESTFKRAKYLRQKTYIQDIY |
| | MKRVDGYLVEGSPDDYTDIKFSVKCAGMTDKIKKE |
| | VTFENFKVGFSRKMKPKPVQVPGGVVLVDDTFTIKG |
| | HHHHHHHHHH |
| 63 | MSVDGLNDIFEAQKIEWHEAMGHHHHHHHHHHSSG |
| pET16.Btagco.His10co.CTerm_His10.Phi29.- | HIEGRHMKHMPRKMYSCRFETTTKVEDCRVWAYGY |
| D12R_N62H_T368F_E375Y_A484E_K512Y.co | MNIEDHSEYKIGNSLDEFMAWVLKVQADLYFHHLK |
| | FDGAFIINWLERNGFKWSADGLPNTYNTIISRMGQW |
| | YMIDICLGYKGKRKIHTVIYDSLKKLPFPVKKIAKDF |
| | KLTVLKGDIDYHKERPVGYKITPEEYAYIKND |
| | IQIIAEALLIQFKQGLDRMTAGSDSLKGFKDIITTKKF |
| | KKVFPTLSLGLDKEVRYAYRGGFTWLNDRFKEKEIG |
| | EGMVFDVNSLYPAQMYSRLLPYGEPIVFEGKYVWD |
| | EDYPLHIQHIRCEFELKEGYIPTIQIKRSRFYKGNEYL |
| | KSSGGEIADLWLSNVDLELMKEHYDLYNVEYISGLK |
| | FKATTGLFKDFIDKWFYIKTTSYGAIKQLAKLMLNSL |
| | YGKFASNPDVTGKVPYLKENGALGFRLGEEETKDPV |
| | YTPMGVFITAWARYTTITAAQACYDRIIYCDTDSIHL |
| | TGTEIPDVIKDIVDPKKLGYWEHESTFKRAKYLRQKT |
| | YIQDIYMKEVDGYLVEGSPDDYTDIKFSVKCAGMTD |
| | KIKKEVTFENFKVGFSRKMKPKPVQVPGGVVLVDDT |
| | FTIKGHHHHHHHHHH |
| 64 | MSVDGLNDIFEAQKIEWHEAMGHHHHHHHHHHSSG |
| pET16.Btagco.His10co.CTerm_His10.Phi29.- | HIEGRHMKHMPRKMYSCRFETTTKVEDCRVWAYGY |
| D12R_T368F_E375Y_A484E_E508R_511.1K_511.2S_512.1G_512.2S.co | MNIEDHSEYKIGNSLDEFMAWVLKVQADLYFHNLK |
| | FDGAFIINWLERNGFKWSADGLPNTYNTIISRMGQW |
| | YMIDICLGYKGKRKIHTVIYDSLKKLPFPVKKIAKDF |
| | KLTVLKGDIDYHKERPVGYKITPEEYAYIKNDIQIIAE |
| | ALLIQFKQGLDRMTAGSDSLKGFKDIITTKKFKKVFP |
| | TLSLGLDKEVRYAYRGGFTWLNDRFKEKEIGEGMVF |
| | DVNSLYPAQMYSRLLPYGEPIVFEGKYVWDEDYPLH |
| | IQHIRCEFELKEGYIPTIQIKRSRFYKGNEYLKSSGGEI |
| | ADLWLSNVDLELMKEHYDLYNVEYISGLKFKATTG |
| | LFKDFIDKWFYIKTTSYGAIKQLAKLMLNSLYGKFAS |
| | NPDVTGKVPYLKENGALGFRLGEEETKDPVYTPMG |
| | VFITAWARYTTITAAQACYDRIIYCDTDSIHLTGTEIP |
| | DVIKDIVDPKKLGYWEHESTFKRAKYLRQKTYIQDIY |
| | MKRVDGKSKGSLVEGSPDDYTDIKFSVKCAGMTDKI |
| | KKEVTFENFKVGFSRKMKPKPVQVPGGVVLVDDTFT |
| | IKGHHHHHHHHHH |
| 65 | MSVDGLNDIFEAQKIEWHEAMGHHHHHHHHHHSSG |
| pET16.Btagco.His10co.CTerm_His10.Phi29.- | HIEGRHMKHMPRKMYSCRFETTTKVEDCRVWAYGY |
| D12R_T368F_E375Y_I378W_A484E_E508R_511.1K_511.2S_512.1G_512.- | MNIEDHSEYKIGNSLDEFMAWVLKVQADLYFHNLK |
| 2S.co | FDGAFIINWLERNGFKWSADGLPNTYNTIISRMGQW |
| | YMIDICLGYKGKRKIHTVIYDSLKKLPFPVKKIAKDF |
| | KLTVLKGDIDYHKERPVGYKITPEEYAYIKNDIQIIAE |
| | ALLIQFKQGLDRMTAGSDSLKGFKDIITTKKFKKVFP |
| | TLSLGLDKEVRYAYRGGFTWLNDRFKEKEIGEGMVF |
| | DVNSLYPAQMYSRLLPYGEPIVFEGKYVWDEDYPLH |
| | IQHIRCEFELKEGYIPTIQIKRSRFYKGNEYLKSSGGEI |
| | ADLWLSNVDLELMKEHYDLYNVEYISGLKFKATTG |
| | LFKDFIDKWFYIKTTSYGAWKQLAKLMLNSLYGKFA |
| | SNPDVTGKVPYLKENGALGFRLGEEETKDPVYTPMG |
| | VFITAWARYTTITAAQACYDRIIYCDTDSIHLTGTEIP |
| | DVIKDIVDPKKLGYWEHESTFKRAKYLRQKTYIQDIY |
| | MKRVDGKSKGSLVEGSPDDYTDIKFSVKCAGMTDKI |
| | KKEVTFENFKVGFSRKMKPKPVQVPGGVVLVDDTFT |
| | IKGHHHHHHHHHH |
| 66 | MSVDGLNDIFEAQKIEWHEAMGHHHHHHHHHHSSG |
| pET16.Btagco.His10co.Phi29.Y148A_E375Y_A484E_K512Y.co | HIEGRHMKHMPRKMYSCDFETTTKVEDCRVWAYG |
| | YMNIEDHSEYKIGNSLDEFMAWVLKVQADLYFHNL |
| | KFDGAFIINWLERNGFKWSADGLPNTYNTIISRMGQ |
| | WYMIDICLGYKGKRKIHTVIYDSLKKLPFPVKKIAKD |
| | FKLTVLKGDIDAHKERPVGYKITPEEYAYIKNDIQIIA |
| | EALLIQFKQGLDRMTAGSDSLKGFKDIITTKKFKKVF |
| | PTLSLGLDKEVRYAYRGGFTWLNDRFKEKEIGEGMV |
| | FDVNSLYPAQMYSRLLPYGEPIVFEGKYVWDEDYPL |
| | HIQHIRCEFELKEGYIPTIQIKRSRFYKGNEYLKSSGGE |
| | IADLWLSNVDLELMKEHYDLYNVEYISGLKFKATTG |
| | LFKDFIDKWTYIKTTSYGAIKQLAKLMLNSLYGKFAS |
| | NPDVTGKVPYLKENGALGFRLGEEETKDPVYTPMG |
| | VFITAWARYTTITAAQACYDRIIYCDTDSIHLTGTEIP |
| | DVIKDIVDPKKLGYWEHESTFKRAKYLRQKTYIQDIY |
| | MKEVDGYLVEGSPDDYTDIKFSVKCAGMTDKIKKE |
| | VTFENFKVGFSRKMKPKPVQVPGGVVLVDDTFTIK |
| 67 | MSVDGLNDIFEAQKIEWHEAMGHHHHHHHHHHSSG |
| pET16.Btagco.His10co.Phi29.- | HIEGRHMKHMPRKMYSCDFETTTKVEDCRVWAYG |
| N62D_A190E_E375Y_K422A_A484E_E508R_K512Y.co | YMNIEDHSEYKIGNSLDEFMAWVLKVQADLYFHDL |
| | KFDGAFIINWLERNGFKWSADGLPNTYNTIISRMGQ |
| | WYMIDICLGYKGKRKIHTVIYDSLKKLPFPVKKIAKD |
| | FKLTVLKGDIDYHKERPVGYKITPEEYAYIKNDIQIIA |
| | EALLIQFKQGLDRMTEGSDSLKGFKDIITTKKFKKVF |
| | PTLSLGLDKEVRYAYRGGFTWLNDRFKEKEIGEGMV |
| | FDVNSLYPAQMYSRLLPYGEPIVFEGKYVWDEDYPL |
| | HIQHIRCEFELKEGYIPTIQIKRSRFYKGNEYLKSSGGE |
| | IADLWLSNVDLELMKEHYDLYNVEYISGLKFKATTG |
| | LFKDFIDKWTYIKTTSYGAIKQLAKLMLNSLYGKFAS |
| | NPDVTGKVPYLKENGALGFRLGEEETADPVYTPMG |
| | VFITAWARYTTITAAQACYDRIIYCDTDSIHLTGTEIP |
| | DVIKDIVDPKKLGYWEHESTFKRAKYLRQKTYIQDIY |
| | MKRVDGYLVEGSPDDYTDIKFSVKCAGMTDKIKKE |
| | VTFENFKVGFSRKMKPKPVQVPGGVVLVDDTFTIK |
| 68 | MSVDGLNDIFEAQKIEWHEAMGHHHHHHHHHHSSG |
| pET16.Btagco.His10co.CTerm_His10.Phi29.- | HIEGRHMKHMPRKMYSCDFETTTKVEDCRVWAYG |
| N62D_I93Y_T368F_T372Y_E375Y_I378W_K478Y_A484E_E508R_511.- | YMNIEDHSEYKIGNSLDEFMAWVLKVQADLYFHDL |
| 1K_511.2S_K512Y_512.1G_512.2S.co | KFDGAFIINWLERNGFKWSADGLPNTYNTYISRMGQ |
| | WYMIDICLGYKGKRKIHTVIYDSLKKLPFPVKKIAKD |
| | FKLTVLKGDIDYHKERPVGYKITPEEYAYIKNDIQIIA |
| | EALLIQFKQGLDRMTAGSDSLKGFKDIITTKKFKKVF |
| | PTLSLGLDKEVRYAYRGGFTWLNDRFKEKEIGEGMV |
| | FDVNSLYPAQMYSRLLPYGEPIVFEGKYVWDEDYPL |
| | HIQHIRCEFELKEGYIPTIQIKRSRFYKGNEYLKSSGGE |
| | IADLWLSNVDLELMKEHYDLYNVEYISGLKFKATTG |
| | LFKDFIDKWFYIKYTSYGAWKQLAKLMLNSLYGKF |
| | ASNPDVTGKVPYLKENGALGFRLGEEETKDPVYTPM |
| | GVFITAWARYTTITAAQACYDRIIYCDTDSIHLTGTEI |
| | PDVIKDIVDPYKLGYWEHESTFKRAKYLRQKTYIQDI |
| | YMKRVDGKSYGSLVEGSPDDYTDIKFSVKCAGMTD |
| | KIKKEVTFENFKVGFSRKMKPKPVQVPGGVVLVDDT |
| | FTIKGHHHHHHHHHH |
| 69 | MSVDGLNDIFEAQKIEWHEAMGHHHHHHHHHHSSG |
| phi29co. Btagco-His10co- | HIEGRHMKHMPRKMYSCDFETTTKVEDCRVWAYG |
| Xaco.N62D_T368F_E375Y_P477Q_A484E_K512Y | YMNIEDHSEYKIGNSLDEFMAWVLKVQADLYFHDL |
| | KFDGAFIINWLERNGFKWSADGLPNTYNTIISRMGQ |
| | WYMIDICLGYKGKRKIHTVIYDSLKKLPFPVKKIAKD |
| | FKLTVLKGDIDYHKERPVGYKITPEEYAYIKNDIQIIA |
| | EALLIQFKQGLDRMTAGSDSLKGFKDIITTKKFKKVF |
| | PTLSLGLDKEVRYAYRGGFTWLNDRFKEKEIGEGMV |
| | FDVNSLYPAQMYSRLLPYGEPIVFEGKYVWDEDYPL |
| | HIQHIRCEFELKEGYIPTIQIKRSRF |
| | YKGNEYLKSSGGEIADLWLSNVDLELMKEHYDLYN |
| | VEYISGLKFKATTGLFKDFIDKWFYIKTTSYGAIKQL |
| | AKLMLNSLYGKFASNPDVTGKVPYLKENGALGFRL |
| | GEEETKDPVYTPMGVFITAWARYTTITAAQACYDRII |
| | YCDTDSIHLTGTEIPDVIKDIVDQKKLGYWEHESTFK |
| | RAKYLRQKTYIQDIYMKEVDGYLVEGSPDDYTDIKF |
| | SVKCAGMTDKIKKEVTFENFKVGFSRKMKPKPVQVP |
| | GGVVLVDDTFTIK |
| 70 | MSVDGLNDIFEAQKIEWHEAMGHHHHHHHHHHSSG |
| pET16.Btagco.His10co.Phi29.N62D_T368F_E375Y_L384M_A484E_K512Y.- | HIEGRHMKHMPRKMYSCDFETTTKVEDCRVWAYG |
| co | YMNIEDHSEYKIGNSLDEFMAWVLKVQADLYFHDL |
| | KFDGAFIINWLERNGFKWSADGLPNTYNTIISRMGQ |
| | WYMIDICLGYKGKRKIHTVIYDSLKKLPFPVKKIAKD |
| | FKLTVLKGDIDYHKERPVGYKITPEEYAYIKNDIQIIA |
| | EALLIQFKQGLDRMTAGSDSLKGFKDIITTKKFKKVF |
| | PTLSLGLDKEVRYAYRGGFTWLNDRFKEKEIGEGMV |
| | FDVNSLYPAQMYSRLLPYGEPIVFEGKYVWDEDYPL |
| | HIQHIRCEFELKEGYIPTIQIKRSRFYKGNEYLKSSGGE |
| | IADLWLSNVDLELMKEHYDLYNVEYISGLKFKATTG |
| | LFKDFIDKWFYIKTTSYGAIKQLAKMMLNSLYGKFA |
| | SNPDVTGKVPYLKENGALGFRLGEEETKDPVYTPMG |
| | VFITAWARYTTITAAQACYDRIIYCDTDSIHLTGTEIP |
| | DVIKDIVDPKKLGYWEHESTFKRAKYLRQKTYIQDIY |
| | MKEVDGYLVEGSPDDYTDIKFSVKCAGMTDKIKKE |
| | VTFENFKVGFSRKMKPKPVQVPGGVVLVDDTFTIK |
| 71 | MSVDGLNDIFEAQKIEWHEAMGHHHHHHHHHHSSG |
| phi29co.Btagco-His10co- | HIEGRHMKHMPRKMYSCDFETTTKVEDCRVWAYG |
| Xaco.T368F_E375Y_P477E_K512Y. | YMNIEDHSEYKIGNSLDEFMAWVLKVQADLYFHNL |
| | KFDGAFIINWLERNGFKWSADGLPNTYNTIISRMGQ |
| | WYMIDICLGYKGKRKIHTVIYDSLKKLPFPVKKIAKD |
| | FKLTVLKGDIDYHKERPVGYKITPEEYAYIKNDIQIIA |
| | EALLIQFKQGLDRMTAGSDSLKGFKDIITTKKFKKVF |
| | PTLSLGLDKEVRYAYRGGFTWLNDRFKEKEIGEGMV |
| | FDVNSLYPAQMYSRLLPYGEPIVFEGKYVWDEDYPL |
| | HIQHIRCEFELKEGYIPTIQIKRSRFYKGNEYLKSSGGE |
| | IADLWLSNVDLELMKEHYDLYNVEYISGLKFKATTG |
| | LFKDFIDKWFYIKTTSYGAIKQLAKLMLNSLYGKFAS |
| | NPDVTGKVPYLKENGALGFRLGEEETKDPVYTPMG |
| | VFITAWARYTTITAAQACYDRIIYCDTDSIHLTGTEIP |
| | DVIKDIVDEKKLGYWAHESTFKRAKYLRQKTYIQDI |
| | YMKEVDGYLVEGSPDDYTDIKFSVKCAGMTDKIKK |
| | EVTFENFKVGFSRKMKPKPVQVPGGVVLVDDTFTIK |
| 72 | MSVDGLNDIFEAQKIEWHEAMGHHHHHHHHHHSSG |
| phi29co. Btagco-His10co- | HIEGRHMKHMPRKMYSCDFETTTKVEDCRVWAYG |
| Xaco.A176V_T368F_E375Y_K512Y. | YMNIEDHSEYKIGNSLDEFMAWVLKVQADLYFHNL |
| | KFDGAFIINWLERNGFKWSADGLPNTYNTIISRMGQ |
| | WYMIDICLGYKGKRKIHTVIYDSLKKLPFPVKKIAKD |
| | FKLTVLKGDIDYHKERPVGYKITPEEYAYIKNDIQIIA |
| | EVLLIQFKQGLDRMTAGSDSLKGFKDIITTKKFKKVF |
| | PTLSLGLDKEVRYAYRGGFTWLNDRFKEKEIGEGMV |
| | FDVNSLYPAQMYSRLLPYGEPIVFEGKYVWDEDYPL |
| | HIQHIRCEFELKEGYIPTIQIKRSRFYKGNEYLKSSGGE |
| | IADLWLSNVDLELMKEHYDLYNVEYISGLKFKATTG |
| | LFKDFIDKWFYIKTTSYGAIKQLAKLMLNSLYGKFAS |
| | NPDVTGKVPYLKENGALGFRLGEEETKDPVYTPMG |
| | VFITAWARYTTITAAQACYDRIIYCDTDSIHLTGTEIP |
| | DVIKDIVDPKKLGYWAHESTFKRAKYLRQKTYIQDI |
| | YMKEVDGYLVEGSPDDYTDIKFSVKCAGMTDKIKK |
| | EVTFENFKVGFSRKMKPKPVQVPGGVVLVDDTFTIK |
| 73 | MSVDGLNDIFEAQKIEWHEAMGHHHHHHHHHHSSG |
| phi29co.Btagco-His10co- | HIEGRHMKHMPRKMYSCDFETTTKVEDCRVWAYG |
| Xaco.T368F_E375Y_K422R_K512Y. | YMNIEDHSEYKIGNSLDEFMAWVLKVQADLYFHNL |
| | KFDGAFIINWLERNGFKWSADGLPNTYNTIISRMGQ |
| | WYMIDICLGYKGKRKIHTVIYDSLKKLPFPVKKIAKD |
| | FKLTVLKGDIDYHKERPVGYKITPEEYAYIKNDIQIIA |
| | EALLIQFKQGLDRMTAGSDSLKGFKDIITTKKFKKVF |
| | PTLSLGLDKEVRYAYRGGFTWLNDRFKEKEIGEGMV |
| | FDVNSLYPAQMYSRLLPYGEPIVFEGKYVWDEDYPL |
| | HIQHIRCEFELKEGYIPTIQIKRSRFYKGNEYLKSSGGE |
| | IADLWLSNVDLELMKEHYDLYNVEYISGLKFKATTG |
| | LFKDFIDKWFYIKTTSYGAIKQLAKLMLNSLYGKFAS |
| | NPDVTGKVPYLKENGALGFRLGEEETRDPVYTPMGV |
| | FITAWARYTTITAAQACYDRIIYCDTDSIHLTGTEIPD |
| | VIKDIVDPKKLGYWAHESTFKRAKYLRQKTYIQDIY |
| | MKEVDGYLVEGSPDDYTDIKFSVKCAGMTDKIKKE |
| | VTFENFKVGFSRKMKPKPVQVPGGVVLVDDTFTIK |
| 74 | MSVDGLNDIFEAQKIEWHEAMGHHHHHHHHHHSSG |
| pET16.Btagco.His10co.Phi29.N62D_E375Y_P477Q_A484E_K512Y.co | HIEGRHMKHMPRKMYSCDFETTTKVEDCRVWAYG |
| | YMNIEDHSEYKIGNSLDEFMAWVLKVQADLYFHDL |
| | KFDGAFIINWLERNGFKWSADGLPNTYNTIISRMGQ |
| | WYMIDICLGYKGKRKIHTVIYDSLKKLPFPVKKIAKD |
| | FKLTVLKGDIDYHKERPVGYKITPEEYAYIKNDIQIIA |
| | EALLIQFKQGLDRMTAGSDSLKGFKDIITTKKFKKVF |
| | PTLSLGLDKEVRYAYRGGFTWLNDRFKEKEIGEGMV |
| | FDVNSLYPAQMYSRLLPYGEPIVFEGKYVWDEDYPL |
| | HIQHIRCEFELKEGYIPTIQIKRSRFYKGNEYLKSSGGE |
| | IADLWLSNVDLELMKEHYDLYNVEYISGLKFKATTG |
| | LFKDFIDKWTYIKTTSYGAIKQLAKLMLNSLYGKFAS |
| | NPDVTGKVPYLKENGALGFRLGEEETKDPVYTPMG |
| | VFITAWARYTTITAAQACYDRIIYCDTDSIHLTGTEIP |
| | DVIKDIVDQKKLGYWEHESTFKRAKYLRQKTYIQDI |
| | YMKEVDGYLVEGSPDDYTDIKFSVKCAGMTDKIKK |
| | EVTFENFKVGFSRKMKPKPVQVPGGVVLVDDTFTIK |
| 75 | MSVDGLNDIFEAQKIEWHEAMGHHHHHHHHHHSSG |
| phi29co.Btagco-His10co- | HIEGRHMKHMPRKMYSCDFETTTKVEDCRVWAYG |
| Xaco.I93F_T368F_E375Y_A484E_K512Y. | YMNIEDHSEYKIGNSLDEFMAWVLKVQADLYFHNL |
| | KFDGAFIINWLERNGFKWSADGLPNTYNTFISRMGQ |
| | WYMIDICLGYKGKRKIHTVIYDSLKKLPFPVKKIAKD |
| | FKLTVLKGDIDYHKERPVGYKITPEEYAYIKNDIQIIA |
| | EALLIQFKQGLDRMTAGSDSLKGFKDIITTKKFKKVF |
| | PTLSLGLDKEVRYAYRGGFTWLNDRFKEKEIGEGMV |
| | FDVNSLYPAQMYSRLLPYGEPIVFEGKYVWDEDYPL |
| | HIQHIRCEFELKEGYIPTIQIKRSRF |
| | YKGNEYLKSSGGEIADLWLSNVDLELMKEHYDLYN |
| | VEYISGLKFKATTGLFKDFIDKWFYIKTTSYGAIKQL |
| | AKLMLNSLYGKFASNPDVTGKVPYLKENGALGFRL |
| | GEEETKDPVYTPMGVFITAWARYTTITAAQACYDRII |
| | YCDTDSIHLTGTEIPDVIKDIVDPKKLGYWEHESTFK |
| | RAKYLRQKTYIQDIYMKEVDGYLVEGSPDDYTDIKF |
| | SVKCAGMTDKIKKEVTFENFKVGFSRKMKPKPVQVP |
| | GGVVLVDDTFTIK |
| 76 | MSVDGLNDIFEAQKIEWHEAMGHHHHHHHHHHSSG |
| pET16.Btagco.His10co.Phi29.L253A_E375Y_A484E_K512Y.co | HIEGRHMKHMPRKMYSCDFETTTKVEDCRVWAYG |
| | YMNIEDHSEYKIGNSLDEFMAWVLKVQADLYFHNL |
| | KFDGAFIINWLERNGFKWSADGLPNTYNTIISRMGQ |
| | WYMIDICLGYKGKRKIHTVIYDSLKKLPFPVKKIAKD |
| | FKLTVLKGDIDYHKERPVGYKITPEEYAYIKNDIQIIA |
| | EALLIQFKQGLDRMTAGSDSLKGFKDIITTKKFKKVF |
| | PTLSLGLDKEVRYAYRGGFTWLNDRFKEKEIGEGMV |
| | FDVNSAYPAQMYSRLLPYGEPIVFEGKYVWDEDYPL |
| | HIQHIRCEFELKEGYIPTIQIKRSRFYKGNEYLKSSGGE |
| | IADLWLSNVDLELMKEHYDLYNVEYISGLKFKATTG |
| | LFKDFIDKWTYIKTTSYGAIKQLAKLMLNSLYGKFAS |
| | NPDVTGKVPYLKENGALGFRLGEEETKDPVYTPMG |
| | VFITAWARYTTITAAQACYDRIIYCDTDSIHLTGTEIP |
| | DVIKDIVDPKKLGYWEHESTFKRAKYLRQKTYIQDIY |
| | MKEVDGYLVEGSPDDYTDIKFSVKCAGMTDKIKKE |
| | VTFENFKVGFSRKMKPKPVQVPGGVVLVDDTFTIK |
| 77 | MSVDGLNDIFEAQKIEWHEAMGHHHHHHHHHHSSG |
| Btagco.His10co.N62D_L253A_E375Y_E420M_A484E_K512Y.co | HIEGRHMKHMPRKMYSCDFETTTKVEDCRVWAYG |
| | YMNIEDHSEYKIGNSLDEFMAWVLKVQADLYFHDL |
| | KFDGAFIINWLERNGFKWSADGLPNTYNTIISRMGQ |
| | WYMIDICLGYKGKRKIHTVIYDSLKKLPFPVKKIAKD |
| | FKLTVLKGDIDYHKERPVGYKITPEEYAYIKNDIQIIA |
| | EALLIQFKQGLDRMTAGSDSLKGFKDIITTKKFKKVF |
| | PTLSLGLDKEVRYAYRGGFTWLNDRFKEKEIGEGMV |
| | FDVNSAYPAQMYSRLLPYGEPIVFEGKYVWDEDYPL |
| | HIQHIRCEFELKEGYIPTIQIKRSRFYKGNEYLKSSGGE |
| | IADLWLSNVDLELMKEHYDLYNVEYISGLKFKATTG |
| | LFKDFIDKWTYIKTTSYGAIKQLAKLMLNSLYGKFAS |
| | NPDVTGKVPYLKENGALGFRLGEEMTKDPVYTPMG |
| | VFITAWARYTTITAAQACYDRIIYCDTDSIHLTGTEIP |
| | DVIKDIVDPKKLGYWEHESTFKRAKYLRQKTYIQDIY |
| | MKEVDGYLVEGSPDDYTDIKFSVKCAGMTDKIKKE |
| | VTFENFKVGFSRKMKPKPVQVPGGVVLVDDTFTIK |
| 78 | MSVDGLNDIFEAQKIEWHEAMGHHHHHHHHHHSSG |
| Btagco.His10co.N62D_L253A_E375Y_K422A_A484E_K512Y.co | HIEGRHMKHMPRKMYSCDFETTTKVEDCRVWAYG |
| | YMNIEDHSEYKIGNSLDEFMAWVLKVQADLYFHDL |
| | KFDGAFIINWLERNGFKWSADGLPNTYNTIISRMGQ |
| | WYMIDICLGYKGKRKIHTVIYDSLKKLPFPVKKIAKD |
| | FKLTVLKGDIDYHKERPVGYKITPEEYAYIKNDIQIIA |
| | EALLIQFKQGLDRMTAGSDSLKGFKDIITTKKFKKVF |
| | PTLSLGLDKEVRYAYRGGFTWLNDRFKEKEIGEGMV |
| | FDVNSAYPAQMYSRLLPYGEPIVFEGKYVWDEDYPL |
| | HIQHIRCEFELKEGYIPTIQIKRSRFYKGNEYLKSSGGE |
| | IADLWLSNVDLELMKEHYDLYNVEYISGLKFKATTG |
| | LFKDFIDKWTYIKTTSYGAIKQLAKLMLNSLYGKFAS |
| | NPDVTGKVPYLKENGALGFRLGEEETADPVYTPMG |
| | VFITAWARYTTITAAQACYDRIIYCDTDSIHLTGTEIP |
| | DVIKDIVDPKKLGYWEHESTFKRAKYLRQKTYIQDIY |
| | MKEVDGYLVEGSPDDYTDIKFSVKCAGMTDKIKKE |
| | VTFENFKVGFSRKMKPKPVQVPGGVVLVDDTFTIK |
| 79 | MSVDGLNDIFEAQKIEWHEAMGHHHHHHHHHHSSG |
| Btagco.His10co.N62D_L253A_E375Y_A484E_E508K_K512Y.co | HIEGRHMKHMPRKMYSCDFETTTKVEDCRVWAYG |
| | YMNIEDHSEYKIGNSLDEFMAWVLKVQADLYFHDL |
| | KFDGAFIINWLERNGFKWSADGLPNTYNTIISRMGQ |
| | WYMIDICLGYKGKRKIHTVIYDSLKKLPFPVKKIAKD |
| | FKLTVLKGDIDYHKERPVGYKITPEEYAYIKNDIQIIA |
| | EALLIQFKQGLDRMTAGSDSLKGFKDIITTKKFKKVF |
| | PTLSLGLDKEVRYAYRGGFTWLNDRFKEKEIGEGMV |
| | FDVNSAYPAQMYSRLLPYGEPIVFEGKYVWDEDYPL |
| | HIQHIRCEFELKEGYIPTIQIKRSRFYKGNEYLKSSGGE |
| | IADLWLSNVDLELMKEHYDLYNVEYISGLKFKATTG |
| | LFKDFIDKWTYIKTTSYGAIKQLAKLMLNSLYGKFAS |
| | NPDVTGKVPYLKENGALGFRLGEEETKDPVYTPMG |
| | VFITAWARYTTITAAQACYDRIIYCDTDSIHLTGTEIP |
| | DVIKDIVDPKKLGYWEHESTFKRAKYLRQKTYIQDIY |
| | MKKVDGYLVEGSPDDYTDIKFSVKCAGMTDKIKKE |
| | VTFENFKVGFSRKMKPKPVQVPGGVVLVDDTFTIK |
| 80 | MSVDGLNDIFEAQKIEWHEAMGHHHHHHHHHHSSG |
| Btagco.His10co.N62D_S215D_L253A_E375Y_A484E_K512Y.co | HIEGRHMKHMPRKMYSCDFETTTKVEDCRVWAYG |
| | YMNIEDHSEYKIGNSLDEFMAWVLKVQADLYFHDL |
| | KFDGAFIINWLERNGFKWSADGLPNTYNTIISRMGQ |
| | WYMIDICLGYKGKRKIHTVIYDSLKKLPFPVKKIAKD |
| | FKLTVLKGDIDYHKERPVGYKITPEEYAYIKNDIQIIA |
| | EALLIQFKQGLDRMTAGSDSLKGFKDIITTKKFKKVF |
| | PTLDLGLDKEVRYAYRGGFTWLNDRFKEKEIGEGM |
| | VFDVNSAYPAQMYSRLLPYGEPIVFEGKYVWDEDYP |
| | LHIQHIRCEFELKEGYIPTIQIKRSRFYKGNEYLKSSGG |
| | EIADLWLSNVDLELMKEHYDLYNVEYISGLKFKATT |
| | GLFKDFIDKWTYIKTTSYGAIKQLAKLMLNSLYGKF |
| | ASNPDVTGKVPYLKENGALGFRLGEEETKDPVYTPM |
| | GVFITAWARYTTITAAQACYDRIIYCDTDSIHLTGTEI |
| | PDVIKDIVDPKKLGYWEHESTFKRAKYLRQKTYIQDI |
| | YMKEVDGYLVEGSPDDYTDIKFSVKCAGMTDKIKK |
| | EVTFENFKVGFSRKMKPKPVQVPGGVVLVDDTFTIK |
| 81 | MSVDGLNDIFEAQKIEWHEAMGHHHHHHHHHHSSG |
| Btagco.His10co.N62D_L253T_E375Y_A484E_K512Y.co | HIEGRHMKHMPRKMYSCDFETTTKVEDCRVWAYG |
| | YMNIEDHSEYKIGNSLDEFMAWVLKVQADLYFHDL |
| | KFDGAFIINWLERNGFKWSADGLPNTYNTIISRMGQ |
| | WYMIDICLGYKGKRKIHTVIYDSLKKLPFPVKKIAKD |
| | FKLTVLKGDIDYHKERPVGYKITPEEYAYIKNDIQIIA |
| | EALLIQFKQGLDRMTAGSDSLKGFKDIITTKKFKKVF |
| | PTLSLGLDKEVRYAYRGGFTWLNDRFKEKEIGEGMV |
| | FDVNSTYPAQMYSRLLPYGEPIVFEGKYVWDEDYPL |
| | HIQHIRCEFELKEGYIPTIQIKRSRFYKGNEYLKSSGGE |
| | IADLWLSNVDLELMKEHYDLYNVEYISGLKFKATTG |
| | LFKDFIDKWTYIKTTSYGAIKQLAKLMLNSLYGKFAS |
| | NPDVTGKVPYLKENGALGFRLGEEETKDPVYTPMG |
| | VFITAWARYTTITAAQACYDRIIYCDTDSIHLTGTEIP |
| | DVIKDIVDPKKLGYWEHESTFKRAKYLRQKTYIQDIY |
| | MKEVDGYLVEGSPDDYTDIKFSVKCAGMTDKIKKE |
| | VTFENFKVGFSRKMKPKPVQVPGGVVLVDDTFTIK |
| 82 | MSVDGLNDIFEAQKIEWHEAMGHHHHHHHHHHSSG |
| Btagco.His10co.N62D_L253A_Y369H_E375Y_A484E_K512Y.co | HIEGRHMKHMPRKMYSCDFETTTKVEDCRVWAYG |
| | YMNIEDHSEYKIGNSLDEFMAWVLKVQADLYFHDL |
| | KFDGAFIINWLERNGFKWSADGLPNTYNTIISRMGQ |
| | WYMIDICLGYKGKRKIHTVIYDSLKKLPFPVKKIAKD |
| | FKLTVLKGDIDYHKERPVGYKITPEEYAYIKNDIQIIA |
| | EALLIQFKQGLDRMTAGSDSLKGFKDIITTKKFKKVF |
| | PTLSLGLDKEVRYAYRGGFTWLNDRFKEKEIGEGMV |
| | FDVNSAYPAQMYSRLLPYGEPIVFEGKYVWDEDYPL |
| | HIQHIRCEFELKEGYIPTIQIKRSRFYKGNEYLKSSGGE |
| | IADLWLSNVDLELMKEHYDLYNVEYISGLKFKATTG |
| | LFKDFIDKWTHIKTTSYGAIKQLAKLMLNSLYGKFAS |
| | NPDVTGKVPYLKENGALGFRLGEEETKDPVYTPMG |
| | VFITAWARYTTITAAQACYDRIIYCDTDSIHLTGTEIP |
| | DVIKDIVDPKKLGYWEHESTFKRAKYLRQKTYIQDIY |
| | MKEVDGYLVEGSPDDYTDIKFSVKCAGMTDKIKKE |
| | VTFENFKVGFSRKMKPKPVQVPGGVVLVDDTFTIK |
| 83 | MSVDGLNDIFEAQKIEWHEAMGHHHHHHHHHHSSG |
| Btagco.His10co.N62D_L253A_Y369G_E375Y_A484E_K512Y.co | HIEGRHMKHMPRKMYSCDFETTTKVEDCRVWAYG |
| | YMNIEDHSEYKIGNSLDEFMAWVLKVQADLYFHDL |
| | KFDGAFIINWLERNGFKWSADGLPNTYNTIISRMGQ |
| | WYMIDICLGYKGKRKIHTVIYDSLKKLPFPVKKIAKD |
| | FKLTVLKGDIDYHKERPVGYKITPEEYAYIKNDIQIIA |
| | EALLIQFKQGLDRMTAGSDSLKGFKDIITTKKFKKVF |
| | PTLSLGLDKEVRYAYRGGFTWLNDRFKEKEIGEGMV |
| | FDVNSAYPAQMYSRLLPYGEPIVFEGKYVWDEDYPL |
| | HIQHIRCEFELKEGYIPTIQIKRSRFYKGNEYLKSSGGE |
| | IADLWLSNVDLELMKEHYDLYNVEYISGLKFKATTG |
| | LFKDFIDKWTGIKTTSYGAIKQLAKLMLNSLYGKFAS |
| | NPDVTGKVPYLKENGALGFRLGEEETKDPVYTPMG |
| | VFITAWARYTTITAAQACYDRIIYCDTDSIHLTGTEIP |
| | DVIKDIVDPKKLGYWEHESTFKRAKYLRQKTYIQDIY |
| | MKEVDGYLVEGSPDDYTDIKFSVKCAGMTDKIKKE |
| | VTFENFKVGFSRKMKPKPVQVPGGVVLVDDTFTIK |
| 84 | MSVDGLNDIFEAQKIEWHEAMGHHHHHHHHHHSSG |
| Btagco.His10co.N62D_L253A_Y369L_E375Y_A484E_K512Y.co | HIEGRHMKHMPRKMYSCDFETTTKVEDCRVWAYG |
| | YMNIEDHSEYKIGNSLDEFMAWVLKVQADLYFHDL |
| | KFDGAFIINWLERNGFKWSADGLPNTYNTIISRMGQ |
| | WYMIDICLGYKGKRKIHTVIYDSLKKLPFPVKKIAKD |
| | FKLTVLKGDIDYHKERPVGYKITPEEYAYIKNDIQIIA |
| | EALLIQFKQGLDRMTAGSDSLKGFKDIITTKKFKKVF |
| | PTLSLGLDKEVRYAYRGGFTWLNDRFKEKEIGEGMV |
| | FDVNSAYPAQMYSRLLPYGEPIVFEGKYVWDEDYPL |
| | HIQHIRCEFELKEGYIPTIQIKRSRFYKGNEYLKSSGGE |
| | IADLWLSNVDLELMKEHYDLYNVEYISGLKFKATTG |
| | LFKDFIDKWTLIKTTSYGAIKQLAKLMLNSLYGKFAS |
| | NPDVTGKVPYLKENGALGFRLGEEETKDPVYTPMG |
| | VFITAWARYTTITAAQACYDRIIYCDTDSIHLTGTEIP |
| | DVIKDIVDPKKLGYWEHESTFKRAKYLRQKTYIQDIY |
| | MKEVDGYLVEGSPDDYTDIKFSVKCAGMTDKIKKE |
| | VTFENFKVGFSRKMKPKPVQVPGGVVLVDDTFTIK |
| 85 | MSVDGLNDIFEAQKIEWHEAMGHHHHHHHHHHSSG |
| Btagco.His10co.N62D_L253A_E375F_A484E_K512Y.co | HIEGRHMKHMPRKMYSCDFETTTKVEDCRVWAYG |
| | YMNIEDHSEYKIGNSLDEFMAWVLKVQADLYFHDL |
| | KFDGAFIINWLERNGFKWSADGLPNTYNTIISRMGQ |
| | WYMIDICLGYKGKRKIHTVIYDSLKKLPFPVKKIAKD |
| | FKLTVLKGDIDYHKERPVGYKITPEEYAYIKNDIQIIA |
| | EALLIQFKQGLDRMTAGSDSLKGFKDIITTKKFKKVF |
| | PTLSLGLDKEVRYAYRGGFTWLNDRFKEKEIGEGMV |
| | FDVNSAYPAQMYSRLLPYGEPIVFEGKYVWDEDYPL |
| | HIQHIRCEFELKEGYIPTIQIKRSRFYKGNEYLKSSGGE |
| | IADLWLSNVDLELMKEHYDLYNVEYISGLKFKATTG |
| | LFKDFIDKWTYIKTTSFGAIKQLAKLMLNSLYGKFAS |
| | NPDVTGKVPYLKENGALGFRLGEEETKDPVYTPMG |
| | VFITAWARYTTITAAQACYDRIIYCDTDSIHLTGTEIP |
| | DVIKDIVDPKKLGYWEHESTFKRAKYLRQKTYIQDIY |
| | MKEVDGYLVEGSPDDYTDIKFSVKCAGMTDKIKKE |
| | VTFENFKVGFSRKMKPKPVQVPGGVVLVDDTFTIK |
| 86 | MSVDGLNDIFEAQKIEWHEAMGHHHHHHHHHHSSG |
| Btagco.His10co.D66R_L253A_E375Y_A484E_K512Y.co | HIEGRHMKHMPRKMYSCDFETTTKVEDCRVWAYG |
| | YMNIEDHSEYKIGNSLDEFMAWVLKVQADLYFHNL |
| | KFRGAFIINWLERNGFKWSADGLPNTYNTIISRMGQ |
| | WYMIDICLGYKGKRKIHTVIYDSLKKLPFPVKKIAKD |
| | FKLTVLKGDIDYHKERPVGYKITPEEYAYIKNDIQIIA |
| | EALLIQFKQGLDRMTAGSDSLKGFKDIITTKKFKKVF |
| | PTLSLGLDKEVRYAYRGGFTWLNDRFKEKEIGEGMV |
| | FDVNSAYPAQMYSRLLPYGEPIVFEGKYVWDEDYPL |
| | HIQHIRCEFELKEGYIPTIQIKRSRFYKGNEYLKSSGGE |
| | IADLWLSNVDLELMKEHYDLYNVEYISGLKFKATTG |
| | LFKDFIDKWTYIKTTSYGAIKQLAKLMLNSLYGKFAS |
| | NPDVTGKVPYLKENGALGFRLGEEETKDPVYTPMG |
| | VFITAWARYTTITAAQACYDRIIYCDTDSIHLTGTEIP |
| | DVIKDIVDPKKLGYWEHESTFKRAKYLRQKTYIQDIY |
| | MKEVDGYLVEGSPDDYTDIKFSVKCAGMTDKIKKE |
| | VTFENFKVGFSRKMKPKPVQVPGGVVLVDDTFTIK |
| 87 | MSVDGLNDIFEAQKIEWHEAMGHHHHHHHHHHSSG |
| Btagco.His10co.N62D_L253A_E375Y_A484E_I504R_K512Y.co | HIEGRHMKHMPRKMYSCDFETTTKVEDCRVWAYG |
| | YMNIEDHSEYKIGNSLDEFMAWVLKVQADLYFHDL |
| | KFDGAFIINWLERNGFKWSADGLPNTYNTIISRMGQ |
| | WYMIDICLGYKGKRKIHTVIYDSLKKLPFPVKKIAKD |
| | FKLTVLKGDIDYHKERPVGYKITPEEYAYIKNDIQIIA |
| | EALLIQFKQGLDRMTAGSDSLKGFKDIITTKKFKKVF |
| | PTLSLGLDKEVRYAYRGGFTWLNDRFKEKEIGEGMV |
| | FDVNSAYPAQMYSRLLPYGEPIVFEGKYVWDEDYPL |
| | HIQHIRCEFELKEGYIPTIQIKRSRFYKGNEYLKSSGGE |
| | IADLWLSNVDLELMKEHYDLYNVEYISGLKFKATTG |
| | LFKDFIDKWTYIKTTSYGAIKQLAKLMLNSLYGKFAS |
| | NPDVTGKVPYLKENGALGFRLGEEETKDPVYTPMG |
| | VFITAWARYTTITAAQACYDRIIYCDTDSIHLTGTEIP |
| | DVIKDIVDPKKLGYWEHESTFKRAKYLRQKTYIQDR |
| | YMKEVDGYLVEGSPDDYTDIKFSVKCAGMTDKIKK |
| | EVTFENFKVGFSRKMKPKPVQVPGGVVLVDDTFTIK |
| 88 | MSVDGLNDIFEAQKIEWHEAMGHHHHHHHHHHSSG |
| Btagco.His10co.N62D_L253A_E375Y_A484E_D510K_K512Y.co | HIEGRHMKHMPRKMYSCDFETTTKVEDCRVWAYG |
| | YMNIEDHSEYKIGNSLDEFMAWVLKVQADLYFHDL |
| | KFDGAFIINWLERNGFKWSADGLPNTYNTIISRMGQ |
| | WYMIDICLGYKGKRKIHTVIYDSLKKLPFPVKKIAKD |
| | FKLTVLKGDIDYHKERPVGYKITPEEYAYIKNDIQIIA |
| | EALLIQFKQGLDRMTAGSDSLKGFKDIITTKKFKKVF |
| | PTLSLGLDKEVRYAYRGGFTWLNDRFKEKEIGEGMV |
| | FDVNSAYPAQMYSRLLPYGEPIVFEGKYVWDEDYPL |
| | HIQHIRCEFELKEGYIPTIQIKRSRFYKGNEYLKSSGGE |
| | IADLWLSNVDLELMKEHYDLYNVEYISGLKFKATTG |
| | LFKDFIDKWTYIKTTSYGAIKQLAKLMLNSLYGKFAS |
| | NPDVTGKVPYLKENGALGFRLGEEETKDPVYTPMG |
| | VFITAWARYTTITAAQACYDRIIYCDTDSIHLTGTEIP |
| | DVIKDIVDPKKLGYWEHESTFKRAKYLRQKTYIQDIY |
| | MKEVKGYLVEGSPDDYTDIKFSVKCAGMTDKIKKE |
| | VTFENFKVGFSRKMKPKPVQVPGGVVLVDDTFTIK |
| 89 | MSVDGLNDIFEAQKIEWHEAMGHHHHHHHHHHSSG |
| Btagco.His10co.CTerm_His10.L253A_E375Y_A484E_K512Y.co | HIEGRHMKHMPRKMYSCDFETTTKVEDCRVWAYG |
| | YMNIEDHSEYKIGNSLDEFMAWVLKVQADLYFHNL |
| | KFDGAFIINWLERNGFKWSADGLPNTYNTIISRMGQ |
| | WYMIDICLGYKGKRKIHTVIYDSLKKLPFPVKKIAKD |
| | FKLTVLKGDIDYHKERPVGYKITPEEYAYIKNDIQIIA |
| | EALLIQFKQGLDRMTAGSDSLKGFKDIITTKKFKKVF |
| | PTLSLGLDKEVRYAYRGGFTWLNDRFKEKEIGEGMV |
| | FDVNSAYPAQMYSRLLPYGEPIVFEGKYVWDEDYPL |
| | HIQHIRCEFELKEGYIPTIQIKRSRFYKGNEYLKSSGGE |
| | IADLWLSNVDLELMKEHYDLYNVEYISGLKFKATTG |
| | LFKDFIDKWTYIKTTSYGAIKQLAKLMLNSLYGKFAS |
| | NPDVTGKVPYLKENGALGFRLGEEETKDPVYTPMG |
| | VFITAWARYTTITAAQACYDRIIYCDTDSIHLTGTEIP |
| | DVIKDIVDPKKLGYWEHESTFKRAKYLRQKTYIQDIY |
| | MKEVDGYLVEGSPDDYTDIKFSVKCAGMTDKIKKE |
| | VTFENFKVGFSRKMKPKPVQVPGGVVLVDDTFTIKG |
| | HHHHHHHHHH |
| 90 | MSVDGLNDFFEAQKIEWHEAMGHHHHHHHHHHSS |
| BtagV7co.His10co.CTerm_His10co.L253A_E375Y_A484E_K512Y.co | GHIEGRHMKHMPRKMYSCDFETTTKVEDCRVWAY |
| | GYMNIEDHSEYKIGNSLDEFMAWVLKVQADLYFHN |
| | LKFDGAFIINWLERNGFKWSADGLPNTYNTIISRMGQ |
| | WYMIDICLGYKGKRKIHTVIYDSLKKLPFPVKKIAKD |
| | FKLTVLKGDIDYHKERPVGYKITPEEYAYIKNDIQIIA |
| | EALLIQFKQGLDRMTAGSDSLKGFKDIITTKKFKKVF |
| | PTLSLGLDKEVRYAYRGGFTWLNDRFKEKEIGEGMV |
| | FDVNSAYPAQMYSRLLPYGEPIVFEGKYVWDEDYPL |
| | HIQHIRCEFELKEGYIPTIQIKRSRFYKGNEYLKSSGGE |
| | IADLWLSNVDLELMKEHYDLYNVEYISGLKFKATTG |
| | LFKDFIDKWTYIKTTSYGAIKQLAKLMLNSLYGKFAS |
| | NPDVTGKVPYLKENGALGFRLGEEETKDPVYTPMG |
| | VFITAWARYTTITAAQACYDRIIYCDTDSIHLTGTEIP |
| | DVIKDIVDPKKLGYWEHESTFKRAKYLRQKTYIQDIY |
| | MKEVDGYLVEGSPDDYTDIKFSVKCAGMTDKIKKE |
| | VTFENFKVGFSRKMKPKPVQVPGGVVLVDDTFTIKG |
| | HHHHHHHHHH |
| 91 | MSVDGLNDIFEAQKIEWHEAMGHHHHHHHHHHSSG |
| Btagco.His10co.CTerm_His10co.L253A_E375Y_A484E_E508R_K512Y.co | HIEGRHMKHMPRKMYSCDFETTTKVEDCRVWAYG |
| | YMNIEDHSEYKIGNSLDEFMAWVLKVQADLYFHNL |
| | KFDGAFIINWLERNGFKWSADGLPNTYNTIISRMGQ |
| | WYMIDICLGYKGKRKIHTVIYDSLKKLPFPVKKIAKD |
| | FKLTVLKGDIDYHKERPVGYKITPEEYAYIKNDIQIIA |
| | EALLIQFKQGLDRMTAGSDSLKGFKDIITTKKFKKVF |
| | PTLSLGLDKEVRYAYRGGFTWLNDRFKEKEIGEGMV |
| | FDVNSAYPAQMYSRLLPYGEPIVFEGKYVWDEDYPL |
| | HIQHIRCEFELKEGYIPTIQIKRSRFYKGNEYLKSSGGE |
| | IADLWLSNVDLELMKEHYDLYNVEYISGLKFKATTG |
| | LFKDFIDKWTYIKTTSYGAIKQLAKLMLNSLYGKFAS |
| | NPDVTGKVPYLKENGALGFRLGEEETKDPVYTPMG |
| | VFITAWARYTTITAAQACYDRIIYCDTDSIHLTGTEIP |
| | DVIKDIVDPKKLGYWEHESTFKRAKYLRQKTYIQDIY |
| | MKRVDGYLVEGSPDDYTDIKFSVKCAGMTDKIKKE |
| | VTFENFKVGFSRKMKPKPVQVPGGVVLVDDTFTIKG |
| | HHHHHHHHHH |

[0375] Optionally, the recombinant DNA polymerase can include a mutation or combination of mutations selected from: an L253 mutation, where the polymerase further comprises a mutation at one or more of T368, E375, A484, or K512; an E375 and K512 mutation, where the polymerase further comprises a mutation at one or more of L253, T368 or A484; an I93 mutation; an S215 mutation; an E420 mutation; a P477 mutation; a D66R mutation; a K135R mutation; a K138R mutation; an L253T mutation; a Y369G mutation; a Y369L mutation; an L384M mutation; a K422A mutation; an I504R mutation; an E508K mutation; an E508R mutation; a D510K mutation; and a T368 mutation, where the polymerase further comprises a mutation at one or more of E375 or K512 (e.g., a T368 mutation, E375Y, and K512Y, or a T368 mutation, E375Y, A484E and K512Y). Positions are identified relative to wild-type Φ29 DNA polymerase (SEQ ID NO:1). Polymerases that include I93, S215, E420, P477, D66R, K135R, K138R, L253T, Y369G, Y369L, L384M, K422A, 1504R, E508K, E508R and/or D510K mutations optionally further include mutations at one or more of L253, T368, E375, A484 or K512.

[0376] A polymerase that includes an I93 mutation optionally includes a mutation selected from I93F and I93Y. Polymerases that include an S215 mutation optionally include an S215D mutation. A polymerase that includes an E420 mutation can include an E420M mutation. When the polymerase includes a P477 mutation, the polymerase optionally includes a mutation selected from P477E and P477Q. Additional exemplary substitutions include I378W, I364D, E486K, E486R, I378K, P300E, Y315L, P300G, Y315V, D12R, D12M, D66K, D66R, D66M, P129D, T189D, T203D, S252D, S329D, N330D, F360D, K361D, T427D, T368Y, K361N, W436Y, V514G, P455D, L381E, N387M, I170F, I170R, A176E, A176T, A176V, Q180L, F181P, K182P, Q183D, Q183K, L185D, L185K, A190E, A190F, A190L, A190P, A190T, A190V, G191P, L253E, K361P, D365E, D365P, L381F, L381K, L381R, E508R, E508V, D523F, D523L, D523R, E420R, L384M, K392R, K392M, K392W, K422M, K422W, F137N, T204E, E508R, 511.1G_{—}511.2S, 512.1G_{—}512.2S, 511.1K_{—}511.2S, K512.1G_{—}512.2K, 507.1E_{—}507.2V_{—}507.3D_{—}507.4G_{—}507.5Y, and 511.1E_{—}511.2V_{—}511.3D_{—}511.4G.

[0377] Additional exemplary polymerase mutations and/or combinations thereof are provided in FIG. 34, and additional exemplary mutations are described herein. Amino acid substitutions and/or insertions are identified relative to a wild-type Φ29 DNA polymerase (SEQ ID NO:1). Essentially any of these mutations, or any combination thereof, can be introduced into a polymerase to produce a modified recombinant polymerase in accordance with the invention.

[0378] Additional exemplary mutation combinations, and optional corresponding exogenous features at the N- and/or C-terminal region of the polymerase, are listed in Table 16. Positions of the mutations are identified relative to a wild-type Φ29 DNA polymerase (SEQ ID NO:1). Polymerases of the invention (including those provided in Table 16) can include any exogenous or heterologous feature (or combination of such features) at the N- and/or C-terminal region. For example, it will be understood that polymerase mutants in Table 16 that do not include, e.g., a C-terminal polyhistidine tag can be modified to include a polyhistidine tag at the C-terminal region, alone or in combination with any of the exogenous or heterologous features described herein. Similarly, some or all of the exogenous features listed in Table 16 can be omitted and still result in a polymerase of the invention.

TABLE 16

| N-terminal | | C-terminal |
|---|---|---|
| features | Mutations | feature |
| BtagV7co.His10co | L253A_E375Y_A484E_K512Y | CTerm_His10co |
| BtagV7co.His10co | L253A_E375Y_A484E_D510K_K512Y | CTerm_His10co |
| BtagV7co.His10co | Y148I_Y224K_E239G_V250I_L253A_E375Y_A484E_D510K_K512Y | CTerm_His10co |
| BtagV7co.His10co | Y148I_Y224K_E239G_V250I_L253A_E375Y_A484E_D510K_K512Y_E515Q | CTerm_His10co |
| BtagV7co.His10co | E239G_L253A_E375Y_A484E_D510K_K512Y | CTerm_His10co |
| BtagV7co.His10co | Y224K_E239G_L253A_E375Y_A484E_D510K_K512Y | CTerm_His10co |
| BtagV7co.His10co | Y148I_Y224K_E239G_L253C_E375Y_A484E_D510K_K512Y | CTerm_His10co |
| Btag.His10co | N62D_V250I_L253A_E375Y_A484E_K512Y | |
| BtagV7co.His10co | Y224K_E239G_L253A_E375Y_A484E_K512Y_F526L | CTerm_His10co |
| Btagco.His10co | L253A_E375Y_A484E_K512Y_E515K | CTerm_His10co |
| BtagV7co.His10co | E239G_L253A_E375Y_A484E_E508R_K512Y | CTerm_His10co |
| Btagco.His10co | Y148I_L253A_E375Y_A484E_K512Y | CTerm_His10co |
| BtagV7co.His10co | D66R_Y148I_Y224K_E239G_V250I_L253A_E375Y_A484E_D510K_K512Y | CTerm_His10co |
| BtagV7co.His10co | N62D_Y148I_Y224K_E239G_V250I_L253A_E375Y_A484E_D510K_K512Y | CTerm_His10co |
| BtagV7co.His10co | K143R_Y148I_Y224K_E239G_V250I_L253A_E375Y_A484E_D510K_K512Y | CTerm_His10co |
| BtagV7co.His10co | D12N_Y224K_E239G_L253A_E375Y_A484E_K512Y | CTerm_His10co |
| BtagV7co.His10co | Y148F_Y224K_E239G_V250I_L253A_E375Y_A484E_D510K_K512Y | CTerm_His10co |
| BtagV7co.His10co | Y148I_Y224K_E239G_V250I_L253A_E375Y_A484E_D510R_K512Y | CTerm_His10co |
| BtagV7co.His10co | Y148I_Y224K_E239G_V250I_L253A_E375Y_A484E_D510H_K512Y | CTerm_His10co |
| BtagV7co.His10co | Y148I_Y224K_E239G_V250I_L253A_E375Y_A484E_E508K_D510K_K512Y | CTerm_His10co |
| | L253A_E375Y_A484E_K512Y | CTerm_His10co. |
| | | GGGSGGGSG |
| | | GGS.BtagV7co |
| | Y148I_Y224K_E239G_V250I_L253A_E375Y_A484E_D510K_K512Y | CTerm_His10co. |
| | | GGGSGGGSG |
| | | GGS.BtagV7co |

[0379] The amino acid sequences of recombinant Φ29 polymerases harboring the exemplary mutation combinations of Table 16 are provided in Tables 17-19. Table 17 includes the polymerase portion of the molecule as well as the one or more exogenous features at the N- and/or C-terminal region of the polymerase, Table 18 includes the polymerase portion of the molecule and the one or more exogenous features at the C-terminal region of the polymerase, and Table 19 includes the amino acid sequence of the polymerase portion only.

TABLE 17

Amino acid sequences of exemplary recombinant Φ29
polymerases including N- and C-terminal exogenous features.

| | |
|---|---|
| BtagV7co.His10co.CTerm_His10co.- | msvdglndffeaqkiewheamghhhhhhhhhhssghiegrhmkhmprkmyscdfett |
| Phi29.- | tkvedcrvwaygymniedhseykignsldefmawvlkvqadlyfhnlkfdgafiinwlerng |
| L253A_E375Y_A484E_K512Y.co | fkwsadglpntyntiisrmgqwymidiclgykgkrkihtviydslkklpfpvkkiakdfkltvlkg |
| SEQ ID NO: 133 | didyhkerpvgykitpeeyayikndiqiiaealliqfkqgldrmtagsdslkgfkdiittkkfkkvf |
| | ptlslgldkevryayrggftwlndrfkekeigegmvfdvnsaypaqmysrllpygepivfegk |
| | yvwdedyplhiqhircefelkegyiptiqikrsrfykgneylkssggeiadlwlsnvdlelmke |
| | hydlynveyisglkfkattglfkdfidkwtyikttsygaikqlaklmlnslygkfasnpdvtgkvp |
| | ylkengalgfrlgeeetkdpvytpmgvfitawaryttitaaqacydriiycdtdsihltgteipdvi |
| | kdivdpkklgywehestfkrakylrqktyiqdiymkevdgylvegspddytdikfsvkcagm |
| | tdkikkevtfenfkvgfsrkmkpkpvqvpggvvlvddtftikghhhhhhhhhh |
| BtagV7co.His10co.CTerm_His10co.- | msvdglndffeaqkiewheamghhhhhhhhhhssghiegrhmkhmprkmyscdfett |
| Phi29.- | tkvedcrvwaygymniedhseykignsldefmawvlkvqadlyfhnlkfdgafiinwlerng |
| L253A_E375Y_A484E_D510K_K512Y.co | fkwsadglpntyntiisrmgqwymidiclgykgkrkihtviydslkklpfpvkkiakdfkltvlkg |
| SEQ ID NO: 134 | didyhkerpvgykitpeeyayikndiqiiaealliqfkqgldrmtagsdslkgfkdiittkkfkkvf |
| | ptlslgldkevryayrggftwlndrfkekeigegmvfdvnsaypaqmysrllpygepivfegk |
| | yvwdedyplhiqhircefelkegyiptiqikrsrfykgneylkssggeiadlwlsnvdlelmke |
| | hydlynveyisglkfkattglfkdfidkwtyikttsygaikqlaklmlnslygkfasnpdvtgkvp |
| | ylkengalgfrlgeeetkdpvytpmgvfitawaryttitaaqacydriiycdtdsihltgteipdvi |
| | kdivdpkklgywehestfkrakylrqktyiqdiymkevkgylvegspddytdikfsvkcagm |
| | tdkikkevtfenfkvgfsrkmkpkpvqvpggvvlvddtftikghhhhhhhhhh |
| BtagV7co.His10co.CTerm_His10co.- | msvdglndffeaqkiewheamghhhhhhhhhhssghiegrhmkhmprkmyscdfett |
| Phi29.-Y148I_Y224K_E239G_V250I_{—} | tkvedcrvwaygymniedhseykignsldefmawvlkvqadlyfhnlkfdgafiinwlerng |
| L253A_E375Y_A484E_D510K_K512Y.co | fkwsadglpntyntiisrmgqwymidiclgykgkrkihtviydslkklpfpvkkiakdfkltvlkg |
| SEQ ID NO: 135 | didihkerpvgykitpeeyayikndiqiiaealliqfkqgldrmtagsdslkgfkdiittkkfkkvfp |
| | tlslgldkevrkayrggftwlndrfkgkeigegmvfdinsaypaqmysrllpygepivfegkyv |
| | wdedyplhiqhircefelkegyiptiqikrsrfykgneylkssggeiadlwlsnvdlelmkehy |
| | dlynveyisglkfkattglfkdfidkwtyikttsygaikqlaklmlnslygkfasnpdvtgkvpylk |
| | engalgfrlgeeetkdpvytpmgvfitawaryttitaaqacydriiycdtdsihltgteipdvikdi |
| | vdpkklgywehestfkrakylrqktyiqdiymkevkgylvegspddytdikfsvkcagmtdk |
| | ikkevtfenfkvgfsrkmkpkpvqvpggvvlvddtftikghhhhhhhhhh |
| BtagV7co.His10co.CTerm_His10co.- | msvdglndffeaqkiewheamghhhhhhhhhhssghiegrhmkhmprkmyscdfett |
| Phi29.Y148I_Y224K_E239G_V250I_{—} | tkvedcrvwaygymniedhseykignsldefmawvlkvqadlyfhnlkfdgafiinwlerng |
| L253A_E375Y_A484E_D510K_K512Y_{—} | fkwsadglpntyntiisrmgqwymidiclgykgkrkihtviydslkklpfpvkkiakdfkltvlkg |
| E515Q.co | didihkerpvgykitpeeyayikndiqiiaealliqfkqgldrmtagsdslkgfkdiittkkfkkvfp |
| SEQ ID NO: 136 | tlslgldkevrkayrggftwlndrfkgkeigegmvfdinsaypaqmysrllpygepivfegkyv |
| | wdedyplhiqhircefelkegyiptiqikrsrfykgneylkssggeiadlwlsnvdlelmkehy |
| | dlynveyisglkfkattglfkdfidkwtyikttsygaikqlaklmlnslygkfasnpdvtgkvpylk |
| | engalgfrlgeeetkdpvytpmgvfitawaryttitaaqacydriiycdtdsihltgteipdvikdi |
| | vdpkklgywehestfkrakylrqktyiqdiymkevkgylvqgspddytdikfsvkcagmtdk |
| | ikkevtfenfkvgfsrkmkpkpvqvpggvvlvddtftikghhhhhhhhhh |
| BtagV7co.His10co.CTerm_His10co.- | msvdglndffeaqkiewheamghhhhhhhhhhssghiegrhmkhmprkmyscdfett |
| Phi29.E239G_L253A_E375Y_A484E_{—} | tkvedcrvwaygymniedhseykignsldefmawvlkvqadlyfhnlkfdgafiinwlerng |
| D510K_K512Y.co | fkwsadglpntyntiisrmgqwymidiclgykgkrkihtviydslkklpfpvkkiakdfkltvlkg |
| SEQ ID NO: 137 | didyhkerpvgykitpeeyayikndiqiiaealliqfkqgldrmtagsdslkgfkdiittkkfkkvf |
| | ptlslgldkevryayrggftwlndrfkgkeigegmvfdvnsaypaqmysrllpygepivfegk |
| | yvwdedyplhiqhircefelkegyiptiqikrsrfykgneylkssggeiadlwlsnvdlelmke |
| | hydlynveyisglkfkattglfkdfidkwtyikttsygaikqlaklmlnslygkfasnpdvtgkvp |
| | ylkengalgfrlgeeetkdpvytpmgvfitawaryttitaaqacydriiycdtdsihltgteipdvi |
| | kdivdpkklgywehestfkrakylrqktyiqdiymkevkgylvegspddytdikfsvkcagm |
| | tdkikkevtfenfkvgfsrkmkpkpvqvpggvvlvddtftikghhhhhhhhhh |
| BtagV7co.His10co.CTerm_His10co.- | msvdglndffeaqkiewheamghhhhhhhhhhssghiegrhmkhmprkmyscdfett |
| Phi29.Y224K_E239G_L253A_E375Y_{—} | tkvedcrvwaygymniedhseykignsldefmawvlkvqadlyfhnlkfdgafiinwlerng |
| A484E_D510K_K512Y.co | fkwsadglpntyntiisrmgqwymidiclgykgkrkihtviydslkklpfpvkkiakdfkltvlkg |
| SEQ ID NO: 138 | didyhkerpvgykitpeeyayikndiqiiaealliqfkqgldrmtagsdslkgfkdiittkkfkkvf |
| | ptlslgldkevrkayrggftwlndrfkgkeigegmvfdvnsaypaqmysrllpygepivfegk |
| | yvwdedyplhiqhircefelkegyiptiqikrsrfykgneylkssggeiadlwlsnvdlelmke |
| | hydlynveyisglkfkattglfkdfidkwtyikttsygaikqlaklmlnslygkfasnpdvtgkvp |
| | ylkengalgfrlgeeetkdpvytpmgvfitawaryttitaaqacydriiycdtdsihltgteipdvi |
| | kdivdpkklgywehestfkrakylrqktyiqdiymkevkgylvegspddytdikfsvkcagm |
| | tdkikkevtfenfkvgfsrkmkpkpvqvpggvvlvddtftikghhhhhhhhhh |
| BtagV7co.His10co.CTerm_His10co.- | msvdglndffeaqkiewheamghhhhhhhhhhssghiegrhmkhmprkmyscdfett |
| Phi29.Y148I_Y224K_E239G_L253C_{—} | tkvedcrvwaygymniedhseykignsldefmawvlkvqadlyfhnlkfdgafiinwlerng |
| E375Y_A484E_D510K_K512Y.co | fkwsadglpntyntiisrmgqwymidiclgykgkrkihtviydslkklpfpvkkiakdfkltvlkg |
| SEQ ID NO: 139 | didihkerpvgykitpeeyayikndiqiiaealliqfkqgldrmtagsdslkgfkdiittkkfkkvfp |
| | tlslgldkevrkayrggftwlndrfkgkeigegmvfdvnscypaqmysrllpygepivfegky |
| | vwdedyplhiqhircefelkegyiptiqikrsrfykgneylkssggeiadlwlsnvdlelmkeh |
| | ydlynveyisglkfkattglfkdfidkwtyikttsygaikqlaklmlnslygkfasnpdvtgkvpyl |
| | kengalgfrlgeeetkdpvytpmgvfitawaryttitaaqacydriiycdtdsihltgteipdvikd |
| | ivdpkklgywehestfkrakylrqktyiqdiymkevkgylvegspddytdikfsvkcagmtd |
| | kikkevtfenfkvgfsrkmkpkpvqvpggvvlvddtftikghhhhhhhhhh |
| Btag.His10co.- | msvdglndifeaqkiewheamghhhhhhhhhhssghiegrhmkhmprkmyscdfett |
| N62D_V250I_L253A_E375Y_{—} | tkvedcrvwaygymniedhseykignsldefmawvlkvqadlyfhdlkfdgafiinwlerng |
| A484E_K512Y.co | fkwsadglpntyntiisrmgqwymidiclgykgkrkihtviydslkklpfpvkkiakdfkltvlkg |
| SEQ ID NO: 140 | didyhkerpvgykitpeeyayikndiqiiaealliqfkqgldrmtagsdslkgfkdiittkkfkkvf |
| | ptlslgldkevryayrggftwlndrfkekeigegmvfdinsaypaqmysrllpygepivfegky |
| | vwdedyplhiqhircefelkegyiptiqikrsrfykgneylkssggeiadlwlsnvdlelmkeh |
| | ydlynveyisglkfkattglfkdfidkwtyikttsygaikqlaklmlnslygkfasnpdvtgkvpyl |
| | kengalgfrlgeeetkdpvytpmgvfitawaryttitaaqacydriiycdtdsihltgteipdvikd |
| | ivdpkklgywehestfkrakylrqktyiqdiymkevdgylvegspddytdikfsvkcagmtd |
| | kikkevtfenfkvgfsrkmkpkpvqvpggvvlvddtftik |
| BtagV7co.His10co.CTerm_His10co.- | msvdglndffeaqkiewheamghhhhhhhhhhssghiegrhmkhmprkmyscdfett |
| Phi29.Y224K_E239G_L253A_E375Y_{—} | tkvedcrvwaygymniedhseykignsldefmawvlkvqadlyfhnlkfdgafiinwlerng |
| A484E_K512Y_F526L.co | fkwsadglpntyntiisrmgqwymidiclgykgkrkihtviydslkklpfpvkkiakdfkltvlkg |
| SEQ ID NO: 141 | didyhkerpvgykitpeeyayikndiqiiaealliqfkqgldrmtagsdslkgfkdiittkkfkkvf |
| | ptlslgldkevrkayrggftwlndrfkgkeigegmvfdvnsaypaqmysrllpygepivfegk |
| | yvwdedyplhiqhircefelkegyiptiqikrsrfykgneylkssggeiadlwlsnvdlelmke |
| | hydlynveyisglkfkattglfkdfidkwtyikttsygaikqlaklmlnslygkfasnpdvtgkvp |
| | ylkengalgfrlgeeetkdpvytpmgvfitawaryttitaaqacydriiycdtdsihltgteipdvi |
| | kdivdpkklgywehestfkrakylrqktyiqdiymkevdgylvegspddytdiklsvkcagm |
| | tdkikkevtfenfkvgfsrkmkpkpvqvpggvvlvddtftikghhhhhhhhhh |
| Btagco.His10co.CTerm_His10co.- | msvdglndifeaqkiewheamghhhhhhhhhhssghiegrhmkhmprkmyscdfett |
| Phi29.L253A_E375Y_A484E_{—} | tkvedcrvwaygymniedhseykignsldefmawvlkvqadlyfhnlkfdgafiinwlerng |
| K512Y_E515K.co | fkwsadglpntyntiisrmgqwymidiclgykgkrkihtviydslkklpfpvkkiakdfkltvlkg |
| SEQ ID NO: 142 | didyhkerpvgykitpeeyayikndiqiiaealliqfkqgldrmtagsdslkgfkdiittkkfkkvf |
| | ptlslgldkevryayrggftwlndrfkekeigegmvfdvnsaypaqmysrllpygepivfegk |
| | yvwdedyplhiqhircefelkegyiptiqikrsrfykgneylkssggeiadlwlsnvdlelmke |
| | hydlynveyisglkfkattglfkdfidkwtyikttsygaikqlaklmlnslygkfasnpdvtgkvp |
| | ylkengalgfrlgeeetkdpvytpmgvfitawaryttitaaqacydriiycdtdsihltgteipdvi |
| | kdivdpkklgywehestfkrakylrqktyiqdiymkevdgylvkgspddytdikfsvkcagm |
| | tdkikkevtfenfkvgfsrkmkpkpvqvpggvvlvddtftikghhhhhhhhhh |
| BtagV7co.His10co.CTerm_His10co.- | msvdglndffeaqkiewheamghhhhhhhhhhssghiegrhmkhmprkmyscdfett |
| Phi29.E239G_L253A_E375Y_A484E_{—} | tkvedcrvwaygymniedhseykignsldefmawvlkvqadlyfhnlkfdgafiinwlerng |
| E508R_K512Y.co | fkwsadglpntyntiisrmgqwymidiclgykgkrkihtviydslkklpfpvkkiakdfkltvlkg |
| SEQ ID NO: 143 | didyhkerpvgykitpeeyayikndiqiiaealliqfkqgldrmtagsdslkgfkdiittkkfkkvf |
| | ptlslgldkevryayrggftwlndrfkgkeigegmvfdvnsaypaqmysrllpygepivfegk |
| | yvwdedyplhiqhircefelkegyiptiqikrsrfykgneylkssggeiadlwlsnvdlelmke |
| | hydlynveyisglkfkattglfkdfidkwtyikttsygaikqlaklmlnslygkfasnpdvtgkvp |
| | ylkengalgfrlgeeetkdpvytpmgvfitawaryttitaaqacydriiycdtdsihltgteipdvi |
| | kdivdpkklgywehestfkrakylrqktyiqdiymkrvdgylvegspddytdikfsvkcagmt |
| | dkikkevtfenfkvgfsrkmkpkpvqvpggvvlvddtftikghhhhhhhhhh |
| Btagco.His10co.CTerm_His10co.- | msvdglndifeaqkiewheamghhhhhhhhhhssghiegrhmkhmprkmyscdfett |
| Phi29.Y148I_L253A_E375Y_{—} | tkvedcrvwaygymniedhseykignsldefmawvlkvqadlyfhnlkfdgafiinwlerng |
| A484E_K512Y.co | fkwsadglpntyntiisrmgqwymidiclgykgkrkihtviydslkklpfpvkkiakdfkltvlkg |
| SEQ ID NO: 144 | didihkerpvgykitpeeyayikndiqiiaealliqfkqgldrmtagsdslkgfkdiittkkfkkvfp |
| | tlslgldkevryayrggftwlndrfkekeigegmvfdvnsaypaqmysrllpygepivfegky |
| | vwdedyplhiqhircefelkegyiptiqikrsrfykgneylkssggeiadlwlsnvdlelmkeh |
| | ydlynveyisglkfkattglfkdfidkwtyikttsygaikqlaklmlnslygkfasnpdvtgkvpyl |
| | kengalgfrlgeeetkdpvytpmgvfitawaryttitaaqacydriiycdtdsihltgteipdvikd |
| | ivdpkklgywehestfkrakylrqktyiqdiymkevdgylvegspddytdikfsvkcagmtd |
| | kikkevtfenfkvgfsrkmkpkpvqvpggvvlvddtftikghhhhhhhhhh |
| BtagV7co.His10co.CTerm_His10co.- | msvdglndffeaqkiewheamghhhhhhhhhhssghiegrhmkhmprkmyscdfett |
| Phi29.D66R_Y148I_Y224K_E239G_{—} | tkvedcrvwaygymniedhseykignsldefmawvlkvqadlyfhnlkfrgafiinwlerngf |
| V250I_L253A_E375Y_A484E_D510K_{—} | kwsadglpntyntiisrmgqwymidiclgykgkrkihtviydslkklpfpvkkiakdfkltvlkgd |
| K512Y.co | idihkerpvgykitpeeyayikndiqiiaealliqfkqgldrmtagsdslkgfkdiittkkfkkvfptl |
| SEQ ID NO: 145 | slgldkevrkayrggftwlndrfkgkeigegmvfdinsaypaqmysrllpygepivfegkyv |
| | wdedyplhiqhircefelkegyiptiqikrsrfykgneylkssggeiadlwlsnvdlelmkehy |
| | dlynveyisglkfkattglfkdfidkwtyikttsygaikqlaklmlnslygkfasnpdvtgkvpylk |
| | engalgfrlgeeetkdpvytpmgvfitawaryttitaaqacydriiycdtdsihltgteipdvikdi |
| | vdpkklgywehestfkrakylrqktyiqdiymkevkgylvegspddytdikfsvkcagmtdk |
| | ikkevtfenfkvgfsrkmkpkpvqvpggvvlvddtftikghhhhhhhhhh |
| BtagV7co.His10co.CTerm_His10co.- | msvdglndffeaqkiewheamghhhhhhhhhhssghiegrhmkhmprkmyscdfett |
| Phi29.N62D_Y148I_Y224K_E239G_{—} | tkvedcrvwaygymniedhseykignsldefmawvlkvqadlyfhdlkfdgafiinwlerng |
| V250I_L253A_E375Y_A484E_D510K_{—} | fkwsadglpntyntiisrmgqwymidiclgykgkrkihtviydslkklpfpvkkiakdfkltvlkg |
| K512Y.co | didihkerpvgykitpeeyayikndiqiiaealliqfkqgldrmtagsdslkgfkdiittkkfkkvfp |
| SEQ ID NO: 146 | tlslgldkevrkayrggftwlndrfkgkeigegmvfdinsaypaqmysrllpygepivfegkyv |
| | wdedyplhiqhircefelkegyiptiqikrsrfykgneylkssggeiadlwlsnvdlelmkehy |
| | dlynveyisglkfkattglfkdfidkwtyikttsygaikqlaklmlnslygkfasnpdvtgkvpylk |
| | engalgfrlgeeetkdpvytpmgvfitawaryttitaaqacydriiycdtdsihltgteipdvikdi |
| | vdpkklgywehestfkrakylrqktyiqdiymkevkgylvegspddytdikfsvkcagmtdk |
| | ikkevtfenfkvgfsrkmkpkpvqvpggvvlvddtftikghhhhhhhhhh |
| BtagV7co.His10co.CTerm_His10co.- | msvdglndffeaqkiewheamghhhhhhhhhhssghiegrhmkhmprkmyscdfett |
| Phi29.K143R_Y148I_Y224K_E239G_{—} | tkvedcrvwaygymniedhseykignsldefmawvlkvqadlyfhnlkfdgafiinwlerng |
| V250I_L253A_E375Y_A484E_D510K_{—} | fkwsadglpntyntiisrmgqwymidiclgykgkrkihtviydslkklpfpvkkiakdfkltvlrg |
| K512Y.co | didihkerpvgykitpeeyayikndiqiiaealliqfkqgldrmtagsdslkgfkdiittkkfkkvfp |
| SEQ ID NO: 147 | tlslgldkevrkayrggftwlndrfkgkeigegmvfdinsaypaqmysrllpygepivfegkyv |
| | wdedyplhiqhircefelkegyiptiqikrsrfykgneylkssggeiadlwlsnvdlelmkehy |
| | dlynveyisglkfkattglfkdfidkwtyikttsygaikqlaklmlnslygkfasnpdvtgkvpylk |
| | engalgfrlgeeetkdpvytpmgvfitawaryttitaaqacydriiycdtdsihltgteipdvikdi |
| | vdpkklgywehestfkrakylrqktyiqdiymkevkgylvegspddytdikfsvkcagmtdk |
| | ikkevtfenfkvgfsrkmkpkpvqvpggvvlvddtftikghhhhhhhhhh |
| BtagV7co.His10co.CTerm_His10co.- | msvdglndffeaqkiewheamghhhhhhhhhhssghiegrhmkhmprkmyscnfett |
| Phi29.D12N_Y224K_E239G_L253A_{—} | tkvedcrvwaygymniedhseykignsldefmawvlkvqadlyfhnlkfdgafiinwlerng |
| E375Y_A484E_K512Y.co | fkwsadglpntyntiisrmgqwymidiclgykgkrkihtviydslkklpfpvkkiakdfkltvlkg |
| SEQ ID NO: 148 | didyhkerpvgykitpeeyayikndiqiiaealliqfkqgldrmtagsdslkgfkdiittkkfkkvf |
| | ptlslgldkevrkayrggftwlndrfkgkeigegmvfdvnsaypaqmysrllpygepivfegk |
| | yvwdedyplhiqhircefelkegyiptiqikrsrfykgneylkssggeiadlwlsnvdlelmke |
| | hydlynveyisglkfkattglfkdfidkwtyikttsygaikqlaklmlnslygkfasnpdvtgkvp |
| | ylkengalgfrlgeeetkdpvytpmgvfitawaryttitaaqacydriiycdtdsihltgteipdvi |
| | kdivdpkklgywehestfkrakylrqktyiqdiymkevdgylvegspddytdikfsvkcagm |
| | tdkikkevtfenfkvgfsrkmkpkpvqvpggvvlvddtftikghhhhhhhhhh |
| BtagV7co.His10co.CTerm_His10co.- | msvdglndffeaqkiewheamghhhhhhhhhhssghiegrhmkhmprkmyscdfett |
| Phi29.Y148F_Y224K_E239G_V250I_{—} | tkvedcrvwaygymniedhseykignsldefmawvlkvqadlyfhnlkfdgafiinwlerng |
| L253A_E375Y_A484E_D510K_{—} | fkwsadglpntyntiisrmgqwymidiclgykgkrkihtviydslkklpfpvkkiakdfkltvlkg |
| K512Y.co | didfhkerpvgykitpeeyayikndiqiiaealliqfkqgldrmtagsdslkgfkdiittkkfkkvfp |
| SEQ ID NO: 149 | tlslgldkevrkayrggftwlndrfkgkeigegmvfdinsaypaqmysrllpygepivfegkyv |
| | wdedyplhiqhircefelkegyiptiqikrsrfykgneylkssggeiadlwlsnvdlelmkehy |
| | dlynveyisglkfkattglfkdfidkwtyikttsygaikqlaklmlnslygkfasnpdvtgkvpylk |
| | engalgfrlgeeetkdpvytpmgvfitawaryttitaaqacydriiycdtdsihltgteipdvikdi |
| | vdpkklgywehestfkrakylrqktyiqdiymkevkgylvegspddytdikfsvkcagmtdk |
| | ikkevtfenfkvgfsrkmkpkpvqvpggvvlvddtftikghhhhhhhhhh |
| BtagV7co.His10co.CTerm_His10co.- | msvdglndffeaqkiewheamghhhhhhhhhhssghiegrhmkhmprkmyscdfett |
| Phi29.Y148I_Y224K_E239G_{—} | tkvedcrvwaygymniedhseykignsldefmawvlkvqadlyfhnlkfdgafiinwlerng |
| V250I_L253A_E375Y_A484E_{—} | fkwsadglpntyntiisrmgqwymidiclgykgkrkihtviydslkklpfpvkkiakdfkltvlkg |
| D510R_K512Y.co | didihkerpvgykitpeeyayikndiqiiaealliqfkqgldrmtagsdslkgfkdiittkkfkkvfp |
| SEQ ID NO: 150 | tlslgldkevrkayrggftwlndrfkgkeigegmvfdinsaypaqmysrllpygepivfegkyv |
| | wdedyplhiqhircefelkegyiptiqikrsrfykgneylkssggeiadlwlsnvdlelmkehy |
| | dlynveyisglkfkattglfkdfidkwtyikttsygaikqlaklmlnslygkfasnpdvtgkvpylk |
| | engalgfrlgeeetkdpvytpmgvfitawaryttitaaqacydriiycdtdsihltgteipdvikdi |
| | vdpkklgywehestfkrakylrqktyiqdiymkevrgylvegspddytdikfsvkcagmtdki |
| | kkevtfenfkvgfsrkmkpkpvqvpggvvlvddtftikghhhhhhhhhh |
| BtagV7co.His10co.CTerm_His10co.- | msvdglndffeaqkiewheamghhhhhhhhhhssghiegrhmkhmprkmyscdfett |
| Phi29.Y148I_Y224K_E239G_V250I_{—} | tkvedcrvwaygymniedhseykignsldefmawvlkvqadlyfhnlkfdgafiinwlerng |
| L253A_E375Y_A484E_D510H_K512Y.co | fkwsadglpntyntiisrmgqwymidiclgykgkrkihtviydslkklpfpvkkiakdfkltvlkg |
| SEQ ID NO: 151 | didihkerpvgykitpeeyayikndiqiiaealliqfkqgldrmtagsdslkgfkdiittkkfkkvfp |
| | tlslgldkevrkayrggftwlndrfkgkeigegmvfdinsaypaqmysrllpygepivfegkyv |
| | wdedyplhiqhircefelkegyiptiqikrsrfykgneylkssggeiadlwlsnvdlelmkehy |
| | dlynveyisglkfkattglfkdfidkwtyikttsygaikqlaklmlnslygkfasnpdvtgkvpylk |
| | engalgfrlgeeetkdpvytpmgvfitawaryttitaaqacydriiycdtdsihltgteipdvikdi |
| | vdpkklgywehestfkrakylrqktyiqdiymkevhgylvegspddytdikfsvkcagmtdk |
| | ikkevtfenfkvgfsrkmkpkpvqvpggvvlvddtftikghhhhhhhhhh |
| BtagV7co.His10co.CTerm_His10co.- | msvdglndffeaqkiewheamghhhhhhhhhhssghiegrhmkhmprkmyscdfett |
| Phi29.Y148I_Y224K_E239G_V250I_{—} | tkvedcrvwaygymniedhseykignsldefmawvlkvqadlyfhnlkfdgafiinwlerng |
| L253A_E375Y_A484E_E508K_{—} | fkwsadglpntyntiisrmgqwymidiclgykgkrkihtviydslkklpfpvkkiakdfkltvlkg |
| D510K_K512Y.co | didihkerpvgykitpeeyayikndiqiiaealliqfkqgldrmtagsdslkgfkdiittkkfkkvfp |
| SEQ ID NO: 152 | tlslgldkevrkayrggftwlndrfkgkeigegmvfdinsaypaqmysrllpygepivfegkyv |
| | wdedyplhiqhircefelkegyiptiqikrsrfykgneylkssggeiadlwlsnvdlelmkehy |
| | dlynveyisglkfkattglfkdfidkwtyikttsygaikqlaklmlnslygkfasnpdvtgkvpylk |
| | engalgfrlgeeetkdpvytpmgvfitawaryttitaaqacydriiycdtdsihltgteipdvikdi |
| | vdpkklgywehestfkrakylrqktyiqdiymkkvkgylvegspddytdikfsvkcagmtdki |
| | kkevtfenfkvgfsrkmkpkpvqvpggvvlvddtftikghhhhhhhhhh |
| CTerm_His10co.GGGSGGGSGGGS.- | mkhmprkmyscdfetttkvedcrvwaygymniedhseykignsldefmawvlkvqadl |
| BtagV7co.Phi29.L253A_E375Y_{—} | yfhnlkfdgafiinwlerngfkwsadglpntyntiisrmgqwymidiclgykgkrkihtviydslk |
| A484E_K512Y.co | klpfpvkkiakdfkltvlkgdidyhkerpvgykitpeeyayikndiqiiaealliqfkqgldrmtag |
| SEQ ID NO: 192 | sdslkgfkdiittkkfkkvfptlslgldkevryayrggftwlndrfkekeigegmvfdvnsaypaq |
| | mysrllpygepivfegkyvwdedyplhiqhircefelkegyiptiqikrsrfykgneylkssgge |
| | iadlwlsnvdlelmkehydlynveyisglkfkattglfkdfidkwtyikttsygaikqlaklmlnsl |
| | ygkfasnpdvtgkvpylkengalgfrlgeeetkdpvytpmgvfitawaryttitaaqacydriiy |
| | cdtdsihltgteipdvikdivdpkklgywehestfkrakylrqktyiqdiymkevdgylvegsp |
| | ddytdikfsvkcagmtdkikkevtfenfkvgfsrkmkpkpvqvpggvvlvddtftikghhhh |
| | hhhhhhgggsgggsgggsglndffeaqkiewhe |
| CTerm_His10co.GGGSGGGSGGGS.- | mkhmprkmyscdfetttkvedcrvwaygymniedhseykignsldefmawvlkvqadl |
| BtagV7co.Phi29.Y148I_Y224K_{—} | yfhnlkfdgafiinwlerngfkwsadglpntyntiisrmgqwymidiclgykgkrkihtviydslk |
| E239G_V250I_L253A_{—} | klpfpvkkiakdfkltvlkgdidihkerpvgykitpeeyayikndiqiiaealliqfkqgldrmtag |
| E375Y_A484E_D510K_{—} | sdslkgfkdiittkkfkkvfptlslgldkevrkayrggftwlndrfkgkeigegmvfdinsaypaq |
| K512Y.co | mysrllpygepivfegkyvwdedyplhiqhircefelkegyiptiqikrsrfykgneylkssgge |
| SEQ ID NO: 193 | iadlwlsnvdlelmkehydlynveyisglkfkattglfkdfidkwtyikttsygaikqlaklmlnsl |
| | ygkfasnpdvtgkvpylkengalgfrlgeeetkdpvytpmgvfitawaryttitaaqacydriiy |
| | cdtdsihltgteipdvikdivdpkklgywehestfkrakylrqktyiqdiymkevkgylvegsp |
| | ddytdikfsvkcagmtdkikkevtfenfkvgfsrkmkpkpvqvpggvvlvddtftikghhhh |
| | hhhhhhgggsgggsgggsglndffeaqkiewhe |

TABLE 18

Amino acid sequences of exemplary recombinant Φ29
polymerases including C-terminal exogenous features.

| | |
|---|---|
| CTerm_His10co.Phi29.- | mkhmprkmyscdfetttkvedcrvwaygymniedhseykignsldefmawvlkvqadl |
| L253A_E375Y_A484E_K512Y.co | yfhnlkfdgafiinwlerngfkwsadglpntyntiisrmgqwymidiclgykgkrkihtviydsl |
| SEQ ID NO: 153 | kklpfpvkkiakdfkltvlkgdidyhkerpvgykitpeeyayikndiqiiaealliqfkqgldrmt |
| | agsdslkgfkdiittkkfkkvfptlslgldkevryayrggftwlndrfkekeigegmvfdvnsay |
| | paqmysrllpygepivfegkyvwdedyplhiqhircefelkegyiptiqikrsrfykgneylks |
| | sggeiadlwlsnvdlelmkehydlynveyisglkfkattglfkdfidkwtyikttsygaikqlakl |
| | mlnslygkfasnpdvtgkvpylkengalgfrlgeeetkdpvytpmgvfitawaryttitaaqa |
| | cydriiycdtdsihltgteipdvikdivdpkklgywehestfkrakylrqktyiqdiymkevdgy |
| | lvegspddytdikfsvkcagmtdkikkevtfenfkvgfsrkmkpkpvqvpggvvlvddtfti |
| | kghhhhhhhhhh |
| CTerm_His10co.Phi29.- | mkhmprkmyscdfetttkvedcrvwaygymniedhseykignsldefmawvlkvqadl |
| L253A_E375Y_A484E_D510K_K512Y.co | yfhnlkfdgafiinwlerngfkwsadglpntyntiisrmgqwymidiclgykgkrkihtviydsl |
| SEQ ID NO: 154 | kklpfpvkkiakdfkltvlkgdidyhkerpvgykitpeeyayikndiqiiaealliqfkqgldrmt |
| | agsdslkgfkdiittkkfkkvfptlslgldkevryayrggftwlndrfkekeigegmvfdvnsay |
| | paqmysrllpygepivfegkyvwdedyplhiqhircefelkegyiptiqikrsrfykgneylks |
| | sggeiadlwlsnvdlelmkehydlynveyisglkfkattglfkdfidkwtyikttsygaikqlakl |
| | mlnslygkfasnpdvtgkvpylkengalgfrlgeeetkdpvytpmgvfitawaryttitaaqa |
| | cydriiycdtdsihltgteipdvikdivdpkklgywehestfkrakylrqktyiqdiymkevkgy |
| | lvegspddytdikfsvkcagmtdkikkevtfenfkvgfsrkmkpkpvqvpggvvlvddtfti |
| | kghhhhhhhhhh |
| CTerm_His10co.Phi29.- | mkhmprkmyscdfetttkvedcrvwaygymniedhseykignsldefmawvlkvqadl |
| Y148I_Y224K_E239G_V250I_L253A_E375Y_{—} | yfhnlkfdgafiinwlerngfkwsadglpntyntiisrmgqwymidiclgykgkrkihtviydsl |
| A484E_D510K_K512Y.co | kklpfpvkkiakdfkltvlkgdidihkerpvgykitpeeyayikndiqiiaealliqfkqgldrmta |
| SEQ ID NO: 155 | gsdslkgfkdiittkkfkkvfptlslgldkevrkayrggftwlndrfkgkeigegmvfdinsayp |
| | aqmysrllpygepivfegkyvwdedyplhiqhircefelkegyiptiqikrsrfykgneylkss |
| | ggeiadlwlsnvdlelmkehydlynveyisglkfkattglfkdfidkwtyikttsygaikqlakl |
| | mlnslygkfasnpdvtgkvpylkengalgfrlgeeetkdpvytpmgvfitawaryttitaaqa |
| | cydriiycdtdsihltgteipdvikdivdpkklgywehestfkrakylrqktyiqdiymkevkgy |
| | lvegspddytdikfsvkcagmtdkikkevtfenfkvgfsrkmkpkpvqvpggvvlvddtfti |
| | kghhhhhhhhhh |
| CTerm_His10co.Phi29.- | mkhmprkmyscdfetttkvedcrvwaygymniedhseykignsldefmawvlkvqadl |
| Y148I_Y224K_E239G_V250I_L253A_E375Y_{—} | yfhnlkfdgafiinwlerngfkwsadglpntyntiisrmgqwymidiclgykgkrkihtviydsl |
| A484E_D510K_K512Y_E515Q.co | kklpfpvkkiakdfkltvlkgdidihkerpvgykitpeeyayikndiqiiaealliqfkqgldrmta |
| SEQ ID NO: 156 | gsdslkgfkdiittkkfkkvfptlslgldkevrkayrggftwlndrfkgkeigegmvfdinsayp |
| | aqmysrllpygepivfegkyvwdedyplhiqhircefelkegyiptiqikrsrfykgneylkss |
| | ggeiadlwlsnvdlelmkehydlynveyisglkfkattglfkdfidkwtyikttsygaikqlakl |
| | mlnslygkfasnpdvtgkvpylkengalgfrlgeeetkdpvytpmgvfitawaryttitaaqa |
| | cydriiycdtdsihltgteipdvikdivdpkklgywehestfkrakylrqktyiqdiymkevkgy |
| | lvqgspddytdikfsvkcagmtdkikkevtfenfkvgfsrkmkpkpvqvpggvvlvddtfti |
| | kghhhhhhhhhh |
| CTerm_His10co.Phi29.- | mkhmprkmyscdfetttkvedcrvwaygymniedhseykignsldefmawvlkvqadl |
| E239G_L253A_E375Y_A484E_D510K_{—} | yfhnlkfdgafiinwlerngfkwsadglpntyntiisrmgqwymidiclgykgkrkihtviydsl |
| K512Y.co | kklpfpvkkiakdfkltvlkgdidyhkerpvgykitpeeyayikndiqiiaealliqfkqgldrmt |
| SEQ ID NO: 157 | agsdslkgfkdiittkkfkkvfptlslgldkevryayrggftwlndrfkgkeigegmvfdvnsay |
| | paqmysrllpygepivfegkyvwdedyplhiqhircefelkegyiptiqikrsrfykgneylks |
| | sggeiadlwlsnvdlelmkehydlynveyisglkfkattglfkdfidkwtyikttsygaikqlakl |
| | mlnslygkfasnpdvtgkvpylkengalgfrlgeeetkdpvytpmgvfitawaryttitaaqa |
| | cydriiycdtdsihltgteipdvikdivdpkklgywehestfkrakylrqktyiqdiymkevkgy |
| | lvegspddytdikfsvkcagmtdkikkevtfenfkvgfsrkmkpkpvqvpggvvlvddtfti |
| | kghhhhhhhhhh |
| CTerm_His10co.Phi29.- | mkhmprkmyscdfetttkvedcrvwaygymniedhseykignsldefmawvlkvqadl |
| Y224K_E239G_L253A_E375Y_A484E_{—} | yfhnlkfdgafiinwlerngfkwsadglpntyntiisrmgqwymidiclgykgkrkihtviydsl |
| D510K_K512Y.co | kklpfpvkkiakdfkltvlkgdidyhkerpvgykitpeeyayikndiqiiaealliqfkqgldrmt |
| SEQ ID NO: 158 | agsdslkgfkdiittkkfkkvfptlslgldkevrkayrggftwlndrfkgkeigegmvfdvnsay |
| | paqmysrllpygepivfegkyvwdedyplhiqhircefelkegyiptiqikrsrfykgneylks |
| | sggeiadlwlsnvdlelmkehydlynveyisglkfkattglfkdfidkwtyikttsygaikqlakl |
| | mlnslygkfasnpdvtgkvpylkengalgfrlgeeetkdpvytpmgvfitawaryttitaaqa |
| | cydriiycdtdsihltgteipdvikdivdpkklgywehestfkrakylrqktyiqdiymkevkgy |
| | lvegspddytdikfsvkcagmtdkikkevtfenfkvgfsrkmkpkpvqvpggvvlvddtfti |
| | kghhhhhhhhhh |
| CTerm_His10co.Phi29.- | mkhmprkmyscdfetttkvedcrvwaygymniedhseykignsldefmawvlkvqadl |
| Y148I_Y224K_E239G_L253C_{—} | yfhnlkfdgafiinwlerngfkwsadglpntyntiisrmgqwymidiclgykgkrkihtviydsl |
| E375Y_A484E_D510K_K512Y.co | kklpfpvkkiakdfkltvlkgdidihkerpvgykitpeeyayikndiqiiaealliqfkqgldrmta |
| SEQ ID NO: 159 | gsdslkgfkdiittkkfkkvfptlslgldkevrkayrggftwlndrfkgkeigegmvfdvnscyp |
| | aqmysrllpygepivfegkyvwdedyplhiqhircefelkegyiptiqikrsrfykgneylkss |
| | ggeiadlwlsnvdlelmkehydlynveyisglkfkattglfkdfidkwtyikttsygaikqlakl |
| | mlnslygkfasnpdvtgkvpylkengalgfrlgeeetkdpvytpmgvfitawaryttitaaqa |
| | cydriiycdtdsihltgteipdvikdivdpkklgywehestfkrakylrqktyiqdiymkevkgy |
| | lvegspddytdikfsvkcagmtdkikkevtfenfkvgfsrkmkpkpvqvpggvvlvddtfti |
| | kghhhhhhhhhh |
| CTerm_His10co.Phi29.- | mkhmprkmyscdfetttkvedcrvwaygymniedhseykignsldefmawvlkvqadl |
| Y224K_E239G_L253A_E375Y_A484E_{—} | yfhnlkfdgafiinwlerngfkwsadglpntyntiisrmgqwymidiclgykgkrkihtviydsl |
| K512Y_F526L.co | kklpfpvkkiakdfkltvlkgdidyhkerpvgykitpeeyayikndiqiiaealliqfkqgldrmt |
| SEQ ID NO: 160 | agsdslkgfkdiittkkfkkvfptlslgldkevrkayrggftwlndrfkgkeigegmvfdvnsay |
| | paqmysrllpygepivfegkyvwdedyplhiqhircefelkegyiptiqikrsrfykgneylks |
| | sggeiadlwlsnvdlelmkehydlynveyisglkfkattglfkdfidkwtyikttsygaikqlakl |
| | mlnslygkfasnpdvtgkvpylkengalgfrlgeeetkdpvytpmgvfitawaryttitaaqa |
| | cydriiycdtdsihltgteipdvikdivdpkklgywehestfkrakylrqktyiqdiymkevdgy |
| | lvegspddytdiklsvkcagmtdkikkevtfenfkvgfsrkmkpkpvqvpggvvlvddtftik |
| | ghhhhhhhhhh |
| CTerm_His10co.Phi29.- | mkhmprkmyscdfetttkvedcrvwaygymniedhseykignsldefmawvlkvqadl |
| L253A_E375Y_A484E_K512Y_E515K.co | yfhnlkfdgafiinwlerngfkwsadglpntyntiisrmgqwymidiclgykgkrkihtviydsl |
| SEQ ID NO: 161 | kklpfpvkkiakdfkltvlkgdidyhkerpvgykitpeeyayikndiqiiaealliqfkqgldrmt |
| | agsdslkgfkdiittkkfkkvfptlslgldkevryayrggftwlndrfkekeigegmvfdvnsay |
| | paqmysrllpygepivfegkyvwdedyplhiqhircefelkegyiptiqikrsrfykgneylks |
| | sggeiadlwlsnvdlelmkehydlynveyisglkfkattglfkdfidkwtyikttsygaikqlakl |
| | mlnslygkfasnpdvtgkvpylkengalgfrlgeeetkdpvytpmgvfitawaryttitaaqa |
| | cydriiycdtdsihltgteipdvikdivdpkklgywehestfkrakylrqktyiqdiymkevdgy |
| | lvkgspddytdikfsvkcagmtdkikkevtfenfkvgfsrkmkpkpvqvpggvvlvddtftik |
| | ghhhhhhhhhh |
| CTerm_His10co.Phi29.- | mkhmprkmyscdfetttkvedcrvwaygymniedhseykignsldefmawvlkvqadl |
| E239G_L253A_E375Y_A484E_E508R_{—} | yfhnlkfdgafiinwlerngfkwsadglpntyntiisrmgqwymidiclgykgkrkihtviydsl |
| K512Y.co | kklpfpvkkiakdfkltvlkgdidyhkerpvgykitpeeyayikndiqiiaealliqfkqgldrmt |
| SEQ ID NO: 162 | agsdslkgfkdiittkkfkkvfptlslgldkevryayrggftwlndrfkgkeigegmvfdvnsay |
| | paqmysrllpygepivfegkyvwdedyplhiqhircefelkegyiptiqikrsrfykgneylks |
| | sggeiadlwlsnvdlelmkehydlynveyisglkfkattglfkdfidkwtyikttsygaikqlakl |
| | mlnslygkfasnpdvtgkvpylkengalgfrlgeeetkdpvytpmgvfitawaryttitaaqa |
| | cydriiycdtdsihltgteipdvikdivdpkklgywehestfkrakylrqktyiqdiymkrvdgyl |
| | vegspddytdikfsvkcagmtdkikkevtfenfkvgfsrkmkpkpvqvpggvvlvddtftik |
| | ghhhhhhhhhh |
| CTerm_His10co.Phi29.- | mkhmprkmyscdfetttkvedcrvwaygymniedhseykignsldefmawvlkvqadl |
| Y148I_L253A_E375Y_A484E_K512Y.co | yfhnlkfdgafiinwlerngfkwsadglpntyntiisrmgqwymidiclgykgkrkihtviydsl |
| SEQ ID NO: 163 | kklpfpvkkiakdfkltvlkgdidihkerpvgykitpeeyayikndiqiiaealliqfkqgldrmta |
| | gsdslkgfkdiittkkfkkvfptlslgldkevryayrggftwlndrfkekeigegmvfdvnsayp |
| | aqmysrllpygepivfegkyvwdedyplhiqhircefelkegyiptiqikrsrfykgneylkss |
| | ggeiadlwlsnvdlelmkehydlynveyisglkfkattglfkdfidkwtyikttsygaikqlakl |
| | mlnslygkfasnpdvtgkvpylkengalgfrlgeeetkdpvytpmgvfitawaryttitaaqa |
| | cydriiycdtdsihltgteipdvikdivdpkklgywehestfkrakylrqktyiqdiymkevdgy |
| | lvegspddytdikfsvkcagmtdkikkevtfenfkvgfsrkmkpkpvqvpggvvlvddtfti |
| | kghhhhhhhhhh |
| CTerm_His10co.Phi29.- | mkhmprkmyscdfetttkvedcrvwaygymniedhseykignsldefmawvlkvqadl |
| D66R_Y148I_Y224K_E239G_V250I_L253A_{—} | yfhnlkfrgafiinwlerngfkwsadglpntyntiisrmgqwymidiclgykgkrkihtviydsl |
| E375Y_A484E_D510K_K512Y.co | kklpfpvkkiakdfkltvlkgdidihkerpvgykitpeeyayikndiqiiaealliqfkqgldrmta |
| SEQ ID NO: 164 | gsdslkgfkdiittkkfkkvfptlslgldkevrkayrggftwlndrfkgkeigegmvfdinsayp |
| | aqmysrllpygepivfegkyvwdedyplhiqhircefelkegyiptiqikrsrfykgneylkss |
| | ggeiadlwlsnvdlelmkehydlynveyisglkfkattglfkdfidkwtyikttsygaikqlakl |
| | mlnslygkfasnpdvtgkvpylkengalgfrlgeeetkdpvytpmgvfitawaryttitaaqa |
| | cydriiycdtdsihltgteipdvikdivdpkklgywehestfkrakylrqktyiqdiymkevkgy |
| | lvegspddytdikfsvkcagmtdkikkevtfenfkvgfsrkmkpkpvqvpggvvlvddtfti |
| | kghhhhhhhhhh |
| CTerm_His10co.Phi29.- | mkhmprkmyscdfetttkvedcrvwaygymniedhseykignsldefmawvlkvqadl |
| N62D_Y148I_Y224K_E239G_V250I_L253A_{—} | yfhdlkfdgafiinwlerngfkwsadglpntyntiisrmgqwymidiclgykgkrkihtviydsl |
| E375Y_A484E_D510K_K512Y.co | kklpfpvkkiakdfkltvlkgdidihkerpvgykitpeeyayikndiqiiaealliqfkqgldrmta |
| SEQ ID NO: 165 | gsdslkgfkdiittkkfkkvfptlslgldkevrkayrggftwlndrfkgkeigegmvfdinsayp |
| | aqmysrllpygepivfegkyvwdedyplhiqhircefelkegyiptiqikrsrfykgneylkss |
| | ggeiadlwlsnvdlelmkehydlynveyisglkfkattglfkdfidkwtyikttsygaikqlakl |
| | mlnslygkfasnpdvtgkvpylkengalgfrlgeeetkdpvytpmgvfitawaryttitaaqa |
| | cydriiycdtdsihltgteipdvikdivdpkklgywehestfkrakylrqktyiqdiymkevkgy |
| | lvegspddytdikfsvkcagmtdkikkevtfenfkvgfsrkmkpkpvqvpggvvlvddtfti |
| | kghhhhhhhhhh |
| CTerm_His10co.Phi29.- | mkhmprkmyscdfetttkvedcrvwaygymniedhseykignsldefmawvlkvqadl |
| K143R_Y148I_Y224K_E239G_V250I_L253A_{—} | yfhnlkfdgafiinwlerngfkwsadglpntyntiisrmgqwymidiclgykgkrkihtviydsl |
| E375Y_A484E_D510K_K512Y.co | kklpfpvkkiakdfkltvlrgdidihkerpvgykitpeeyayikndiqiiaealliqfkqgldrmta |
| SEQ ID NO: 166 | gsdslkgfkdiittkkfkkvfptlslgldkevrkayrggftwlndrfkgkeigegmvfdinsayp |
| | aqmysrllpygepivfegkyvwdedyplhiqhircefelkegyiptiqikrsrfykgneylkss |
| | ggeiadlwlsnvdlelmkehydlynveyisglkfkattglfkdfidkwtyikttsygaikqlakl |
| | mlnslygkfasnpdvtgkvpylkengalgfrlgeeetkdpvytpmgvfitawaryttitaaqa |
| | cydriiycdtdsihltgteipdvikdivdpkklgywehestfkrakylrqktyiqdiymkevkgy |
| | lvegspddytdikfsvkcagmtdkikkevtfenfkvgfsrkmkpkpvqvpggvvlvddtfti |
| | kghhhhhhhhhh |
| CTerm_His10co.Phi29.- | mkhmprkmyscnfetttkvedcrvwaygymniedhseykignsldefmawvlkvqadl |
| D12N_Y224K_E239G_L253A_E375Y_{—} | yfhnlkfdgafiinwlerngfkwsadglpntyntiisrmgqwymidiclgykgkrkihtviydsl |
| A484E_K512Y.co | kklpfpvkkiakdfkltvlkgdidyhkerpvgykitpeeyayikndiqiiaealliqfkqgldrmt |
| SEQ ID NO: 167 | agsdslkgfkdiittkkfkkvfptlslgldkevrkayrggftwlndrfkgkeigegmvfdvnsay |
| | paqmysrllpygepivfegkyvwdedyplhiqhircefelkegyiptiqikrsrfykgneylks |
| | sggeiadlwlsnvdlelmkehydlynveyisglkfkattglfkdfidkwtyikttsygaikqlakl |
| | mlnslygkfasnpdvtgkvpylkengalgfrlgeeetkdpvytpmgvfitawaryttitaaqa |
| | cydriiycdtdsihltgteipdvikdivdpkklgywehestfkrakylrqktyiqdiymkevdgy |
| | lvegspddytdikfsvkcagmtdkikkevtfenfkvgfsrkmkpkpvqvpggvvlvddtfti |
| | kghhhhhhhhhh |
| CTerm_His10co.Phi29.- | mkhmprkmyscdfetttkvedcrvwaygymniedhseykignsldefmawvlkvqadl |
| Y148F_Y224K_E239G_V250I_L253A_E375Y_{—} | yfhnlkfdgafiinwlerngfkwsadglpntyntiisrmgqwymidiclgykgkrkihtviydsl |
| A484E_D510K_K512Y.co | kklpfpvkkiakdfkltvlkgdidfhkerpvgykitpeeyayikndiqiiaealliqfkqgldrmta |
| SEQ ID NO: 168 | gsdslkgfkdiittkkfkkvfptlslgldkevrkayrggftwlndrfkgkeigegmvfdinsayp |
| | aqmysrllpygepivfegkyvwdedyplhiqhircefelkegyiptiqikrsrfykgneylkss |
| | ggeiadlwlsnvdlelmkehydlynveyisglkfkattglfkdfidkwtyikttsygaikqlakl |
| | mlnslygkfasnpdvtgkvpylkengalgfrlgeeetkdpvytpmgvfitawaryttitaaqa |
| | cydriiycdtdsihltgteipdvikdivdpkklgywehestfkrakylrqktyiqdiymkevkgy |
| | lvegspddytdikfsvkcagmtdkikkevtfenfkvgfsrkmkpkpvqvpggvvlvddtfti |
| | kghhhhhhhhhh |
| CTerm_His10co.Phi29.- | mkhmprkmyscdfetttkvedcrvwaygymniedhseykignsldefmawvlkvqadl |
| Y148I_Y224K_E239G_V250I_L253A_E375Y_{—} | yfhnlkfdgafiinwlerngfkwsadglpntyntiisrmgqwymidiclgykgkrkihtviydsl |
| A484E_D510R_K512Y.co | kklpfpvkkiakdfkltvlkgdidihkerpvgykitpeeyayikndiqiiaealliqfkqgldrmta |
| SEQ ID NO: 169 | gsdslkgfkdiittkkfkkvfptlslgldkevrkayrggftwlndrfkgkeigegmvfdinsayp |
| | aqmysrllpygepivfegkyvwdedyplhiqhircefelkegyiptiqikrsrfykgneylkss |
| | ggeiadlwlsnvdlelmkehydlynveyisglkfkattglfkdfidkwtyikttsygaikqlakl |
| | mlnslygkfasnpdvtgkvpylkengalgfrlgeeetkdpvytpmgvfitawaryttitaaqa |
| | cydriiycdtdsihltgteipdvikdivdpkklgywehestfkrakylrqktyiqdiymkevrgyl |
| | vegspddytdikfsvkcagmtdkikkevtfenfkvgfsrkmkpkpvqvpggvvlvddtftik |
| | ghhhhhhhhhh |
| CTerm_His10co.Phi29.- | mkhmprkmyscdfetttkvedcrvwaygymniedhseykignsldefmawvlkvqadl |
| Y148I_Y224K_E239G_V250I_L253A_E375Y_{—} | yfhnlkfdgafiinwlerngfkwsadglpntyntiisrmgqwymidiclgykgkrkihtviydsl |
| A484E_D510H_K512Y.co | kklpfpvkkiakdfkltvlkgdidihkerpvgykitpeeyayikndiqiiaealliqfkqgldrmta |
| SEQ ID NO: 170 | gsdslkgfkdiittkkfkkvfptlslgldkevrkayrggftwlndrfkgkeigegmvfdinsayp |
| | aqmysrllpygepivfegkyvwdedyplhiqhircefelkegyiptiqikrsrfykgneylkss |
| | ggeiadlwlsnvdlelmkehydlynveyisglkfkattglfkdfidkwtyikttsygaikqlakl |
| | mlnslygkfasnpdvtgkvpylkengalgfrlgeeetkdpvytpmgvfitawaryttitaaqa |
| | cydriiycdtdsihltgteipdvikdivdpkklgywehestfkrakylrqktyiqdiymkevhgy |
| | lvegspddytdikfsvkcagmtdkikkevtfenfkvgfsrkmkpkpvqvpggvvlvddtfti |
| | kghhhhhhhhhh |
| CTerm_His10co.Phi29.- | mkhmprkmyscdfetttkvedcrvwaygymniedhseykignsldefmawvlkvqadl |
| Y148I_Y224K_E239G_V250I_L253A_E375Y_{—} | yfhnlkfdgafiinwlerngfkwsadglpntyntiisrmgqwymidiclgykgkrkihtviydsl |
| A484E_E508K_D510K_K512Y.co | kklpfpvkkiakdfkltvlkgdidihkerpvgykitpeeyayikndiqiiaealliqfkqgldrmta |
| SEQ ID NO: 171 | gsdslkgfkdiittkkfkkvfptlslgldkevrkayrggftwlndrfkgkeigegmvfdinsayp |
| | aqmysrllpygepivfegkyvwdedyplhiqhircefelkegyiptiqikrsrfykgneylkss |
| | ggeiadlwlsnvdlelmkehydlynveyisglkfkattglfkdfidkwtyikttsygaikqlakl |
| | mlnslygkfasnpdvtgkvpylkengalgfrlgeeetkdpvytpmgvfitawaryttitaaqa |
| | cydriiycdtdsihltgteipdvikdivdpkklgywehestfkrakylrqktyiqdiymkkvkgyl |
| | vegspddytdikfsvkcagmtdkikkevtfenfkvgfsrkmkpkpvqvpggvvlvddtftik |
| | ghhhhhhhhhh |

TABLE 19

Amino acid sequences of exemplary recombinant Φ29
polymerases.

| | |
|---|---|
| Phi29.L253A_E375Y_A484E_K512Y.co | mkhmprkmyscdfetttkvedcrvwaygymniedhseykignsldefmawvlkvqadl |
| SEQ ID NO: 172 | yfhnlkfdgafiinwlerngfkwsadglpntyntiisrmgqwymidiclgykgkrkihtviydsl |
| | kklpfpvkkiakdfkltvlkgdidyhkerpvgykitpeeyayikndiqiiaealliqfkqgldrmt |
| | agsdslkgfkdiittkkfkkvfptlslgldkevryayrggftwlndrfkekeigegmvfdvnsay |
| | paqmysrllpygepivfegkyvwdedyplhiqhircefelkegyiptiqikrsrfykgneylks |
| | sggeiadlwlsnvdlelmkehydlynveyisglkfkattglfkdfidkwtyikttsygaikqlakl |
| | mlnslygkfasnpdvtgkvpylkengalgfrlgeeetkdpvytpmgvfitawaryttitaaqa |
| | cydriiycdtdsihltgteipdvikdivdpkklgywehestfkrakylrqktyiqdiymkevdgy |
| | lvegspddytdikfsvkcagmtdkikkevtfenfkvgfsrkmkpkpvqvpggvvlvddtftik |
| Phi29.L253A_E375Y_A484E_D510K_{—} | mkhmprkmyscdfetttkvedcrvwaygymniedhseykignsldefmawvlkvqadl |
| K512Y.co | yfhnlkfdgafiinwlerngfkwsadglpntyntiisrmgqwymidiclgykgkrkihtviydsl |
| SEQ ID NO: 173 | kklpfpvkkiakdfkltvlkgdidyhkerpvgykitpeeyayikndiqiiaealliqfkqgldrmt |
| | agsdslkgfkdiittkkfkkvfptlslgldkevryayrggftwlndrfkekeigegmvfdvnsay |
| | paqmysrllpygepivfegkyvwdedyplhiqhircefelkegyiptiqikrsrfykgneylks |
| | sggeiadlwlsnvdlelmkehydlynveyisglkfkattglfkdfidkwtyikttsygaikqlakl |
| | mlnslygkfasnpdvtgkvpylkengalgfrlgeeetkdpvytpmgvfitawaryttitaaqa |
| | cydriiycdtdsihltgteipdvikdivdpkklgywehestfkrakylrqktyiqdiymkevkgy |
| | lvegspddytdikfsvkcagmtdkikkevtfenfkvgfsrkmkpkpvqvpggvvlvddtftik |
| Phi29.Y148I_Y224K_E239G_V250I_{—} | mkhmprkmyscdfetttkvedcrvwaygymniedhseykignsldefmawvlkvqadl |
| L253A_E375Y_A484E_D510K_K512Y.co | yfhnlkfdgafiinwlerngfkwsadglpntyntiisrmgqwymidiclgykgkrkihtviydsl |
| SEQ ID NO: 174 | kklpfpvkkiakdfkltvlkgdidihkerpvgykitpeeyayikndiqiiaealliqfkqgldrmta |
| | gsdslkgfkdiittkkfkkvfptlslgldkevrkayrggftwlndrfkgkeigegmvfdinsayp |
| | aqmysrllpygepivfegkyvwdedyplhiqhircefelkegyiptiqikrsrfykgneylkss |
| | ggeiadlwlsnvdlelmkehydlynveyisglkfkattglfkdfidkwtyikttsygaikqlakl |
| | mlnslygkfasnpdvtgkvpylkengalgfrlgeeetkdpvytpmgvfitawaryttitaaqa |
| | cydriiycdtdsihltgteipdvikdivdpkklgywehestfkrakylrqktyiqdiymkevkgy |
| | lvegspddytdikfsvkcagmtdkikkevtfenfkvgfsrkmkpkpvqvpggvvlvddtftik |
| Phi29.Y148I_Y224K_E239G_V250I_L253A_{—} | mkhmprkmyscdfetttkvedcrvwaygymniedhseykignsldefmawvlkvqadl |
| E375Y_A484E_D510K_K512Y_E515Q.co | yfhnlkfdgafiinwlerngfkwsadglpntyntiisrmgqwymidiclgykgkrkihtviydsl |
| SEQ ID NO: 175 | kklpfpvkkiakdfkltvlkgdidihkerpvgykitpeeyayikndiqiiaealliqfkqgldrmta |
| | gsdslkgfkdiittkkfkkvfptlslgldkevrkayrggftwlndrfkgkeigegmvfdinsayp |
| | aqmysrllpygepivfegkyvwdedyplhiqhircefelkegyiptiqikrsrfykgneylkss |
| | ggeiadlwlsnvdlelmkehydlynveyisglkfkattglfkdfidkwtyikttsygaikqlakl |
| | mlnslygkfasnpdvtgkvpylkengalgfrlgeeetkdpvytpmgvfitawaryttitaaqa |
| | cydriiycdtdsihltgteipdvikdivdpkklgywehestfkrakylrqktyiqdiymkevkgy |
| | lvqgspddytdikfsvkcagmtdkikkevtfenfkvgfsrkmkpkpvqvpggvvlvddtftik |
| Phi29.E239G_L253A_E375Y_A484E_D510K_{—} | mkhmprkmyscdfetttkvedcrvwaygymniedhseykignsldefmawvlkvqadl |
| K512Y.co | yfhnlkfdgafiinwlerngfkwsadglpntyntiisrmgqwymidiclgykgkrkihtviydsl |
| SEQ ID NO: 176 | kklpfpvkkiakdfkltvlkgdidyhkerpvgykitpeeyayikndiqiiaealliqfkqgldrmt |
| | agsdslkgfkdiittkkfkkvfptlslgldkevryayrggftwlndrfkgkeigegmvfdvnsay |
| | paqmysrllpygepivfegkyvwdedyplhiqhircefelkegyiptiqikrsrfykgneylks |
| | sggeiadlwlsnvdlelmkehydlynveyisglkfkattglfkdfidkwtyikttsygaikqlakl |
| | mlnslygkfasnpdvtgkvpylkengalgfrlgeeetkdpvytpmgvfitawaryttitaaqa |
| | cydriiycdtdsihltgteipdvikdivdpkklgywehestfkrakylrqktyiqdiymkevkgy |
| | lvegspddytdikfsvkcagmtdkikkevtfenfkvgfsrkmkpkpvqvpggvvlvddtftik |
| Phi29.- | mkhmprkmyscdfetttkvedcrvwaygymniedhseykignsldefmawvlkvqadl |
| Y224K_E239G_L253A_E375Y_A484E_D510K_{—} | yfhnlkfdgafiinwlerngfkwsadglpntyntiisrmgqwymidiclgykgkrkihtviydsl |
| K512Y.co | kklpfpvkkiakdfkltvlkgdidyhkerpvgykitpeeyayikndiqiiaealliqfkqgldrmt |
| SEQ ID NO: 177 | agsdslkgfkdiittkkfkkvfptlslgldkevrkayrggftwlndrfkgkeigegmvfdvnsay |
| | paqmysrllpygepivfegkyvwdedyplhiqhircefelkegyiptiqikrsrfykgneylks |
| | sggeiadlwlsnvdlelmkehydlynveyisglkfkattglfkdfidkwtyikttsygaikqlakl |
| | mlnslygkfasnpdvtgkvpylkengalgfrlgeeetkdpvytpmgvfitawaryttitaaqa |
| | cydriiycdtdsihltgteipdvikdivdpkklgywehestfkrakylrqktyiqdiymkevkgy |
| | lvegspddytdikfsvkcagmtdkikkevtfenfkvgfsrkmkpkpvqvpggvvlvddtftik |
| Phi29.Y148I_Y224K_E239G_L253C_E375Y_{—} | mkhmprkmyscdfetttkvedcrvwaygymniedhseykignsldefmawvlkvqadl |
| A484E_D510K_K512Y.co | yfhnlkfdgafiinwlerngfkwsadglpntyntiisrmgqwymidiclgykgkrkihtviydsl |
| SEQ ID NO: 178 | kklpfpvkkiakdfkltvlkgdidihkerpvgykitpeeyayikndiqiiaealliqfkqgldrmta |
| | gsdslkgfkdiittkkfkkvfptlslgldkevrkayrggftwlndrfkgkeigegmvfdvnscyp |
| | aqmysrllpygepivfegkyvwdedyplhiqhircefelkegyiptiqikrsrfykgneylkss |
| | ggeiadlwlsnvdlelmkehydlynveyisglkfkattglfkdfidkwtyikttsygaikqlakl |
| | mlnslygkfasnpdvtgkvpylkengalgfrlgeeetkdpvytpmgvfitawaryttitaaqa |
| | cydriiycdtdsihltgteipdvikdivdpkklgywehestfkrakylrqktyiqdiymkevkgy |
| | lvegspddytdikfsvkcagmtdkikkevtfenfkvgfsrkmkpkpvqvpggvvlvddtftik |
| N62D_V250I_L253A_E375Y_A484E_K512Y.- | mkhmprkmyscdfetttkvedcrvwaygymniedhseykignsldefmawvlkvqadl |
| co | yfhdlkfdgafiinwlerngfkwsadglpntyntiisrmgqwymidiclgykgkrkihtviydsl |
| SEQ ID NO: 179 | kklpfpvkkiakdfkltvlkgdidyhkerpvgykitpeeyayikndiqiiaealliqfkqgldrmt |
| | agsdslkgfkdiittkkfkkvfptlslgldkevryayrggftwlndrfkekeigegmvfdinsay |
| | paqmysrllpygepivfegkyvwdedyplhiqhircefelkegyiptiqikrsrfykgneylks |
| | sggeiadlwlsnvdlelmkehydlynveyisglkfkattglfkdfidkwtyikttsygaikqlakl |
| | mlnslygkfasnpdvtgkvpylkengalgfrlgeeetkdpvytpmgvfitawaryttitaaqa |
| | cydriiycdtdsihltgteipdvikdivdpkklgywehestfkrakylrqktyiqdiymkevdgy |
| | lvegspddytdikfsvkcagmtdkikkevtfenfkvgfsrkmkpkpvqvpggvvlvddtftik |
| Phi29.Y224K_E239G_L253A_E375Y_A484E_{—} | mkhmprkmyscdfetttkvedcrvwaygymniedhseykignsldefmawvlkvqadl |
| K512Y_F526L.co | yfhnlkfdgafiinwlerngfkwsadglpntyntiisrmgqwymidiclgykgkrkihtviydsl |
| SEQ ID NO: 180 | kklpfpvkkiakdfkltvlkgdidyhkerpvgykitpeeyayikndiqiiaealliqfkqgldrmt |
| | agsdslkgfkdiittkkfkkvfptlslgldkevrkayrggftwlndrfkgkeigegmvfdvnsay |
| | paqmysrllpygepivfegkyvwdedyplhiqhircefelkegyiptiqikrsrfykgneylks |
| | sggeiadlwlsnvdlelmkehydlynveyisglkfkattglfkdfidkwtyikttsygaikqlakl |
| | mlnslygkfasnpdvtgkvpylkengalgfrlgeeetkdpvytpmgvfitawaryttitaaqa |
| | cydriiycdtdsihltgteipdvikdivdpkklgywehestfkrakylrqktyiqdiymkevdgy |
| | lvegspddytdiklsvkcagmtdkikkevtfenfkvgfsrkmkpkpvqvpggvvlvddtftik |
| Phi29.L253A_E375Y_A484E_K512Y_{—} | mkhmprkmyscdfetttkvedcrvwaygymniedhseykignsldefmawvlkvqadl |
| E515K.co | yfhnlkfdgafiinwlerngfkwsadglpntyntiisrmgqwymidiclgykgkrkihtviydsl |
| SEQ ID NO: 181 | kklpfpvkkiakdfkltvlkgdidyhkerpvgykitpeeyayikndiqiiaealliqfkqgldrmt |
| | agsdslkgfkdiittkkfkkvfptlslgldkevryayrggftwlndrfkekeigegmvfdvnsay |
| | paqmysrllpygepivfegkyvwdedyplhiqhircefelkegyiptiqikrsrfykgneylks |
| | sggeiadlwlsnvdlelmkehydlynveyisglkfkattglfkdfidkwtyikttsygaikqlakl |
| | mlnslygkfasnpdvtgkvpylkengalgfrlgeeetkdpvytpmgvfitawaryttitaaqa |
| | cydriiycdtdsihltgteipdvikdivdpkklgywehestfkrakylrqktyiqdiymkevdgy |
| | lvkgspddytdikfsvkcagmtdkikkevtfenfkvgfsrkmkpkpvqvpggvvlvddtftik |
| Phi29.E239G_L253A_E375Y_A484E_E508R_{—} | mprkmyscdfetttkvedcrvwaygymniedhseykignsldefmawvlkvqadlyfhn |
| K512Y.co | lkfdgafiinwlerngfkwsadglpntyntiisrmgqwymidiclgykgkrkihtviydslkklp |
| SEQ ID NO: 182 | fpvkkiakdfkltvlkgdidyhkerpvgykitpeeyayikndiqiiaealliqfkqgldrmtags |
| | dslkgfkdiittkkfkkvfptlslgldkevryayrggftwlndrfkgkeigegmvfdvnsaypaq |
| | mysrllpygepivfegkyvwdedyplhiqhircefelkegyiptiqikrsrfykgneylkssgg |
| | eiadlwlsnvdlelmkehydlynveyisglkfkattglfkdfidkwtyikttsygaikqlaklmln |
| | slygkfasnpdvtgkvpylkengalgfrlgeeetkdpvytpmgvfitawaryttitaaqacyd |
| | riiycdtdsihltgteipdvikdivdpkklgywehestfkrakylrqktyiqdiymkrvdgylveg |
| | spddytdikfsvkcagmtdkikkevtfenfkvgfsrkmkpkpvqvpggvvlvddtftik |
| Phi29.Y148I_L253A_E375Y_A484E_{—} | mkhmprkmyscdfetttkvedcrvwaygymniedhseykignsldefmawvlkvqadl |
| K512Y.co | yfhnlkfdgafiinwlerngfkwsadglpntyntiisrmgqwymidiclgykgkrkihtviydsl |
| SEQ ID NO: 183 | kklpfpvkkiakdfkltvlkgdidihkerpvgykitpeeyayikndiqiiaealliqfkqgldrmta |
| | gsdslkgfkdiittkkfkkvfptlslgldkevryayrggftwlndrfkekeigegmvfdvnsayp |
| | aqmysrllpygepivfegkyvwdedyplhiqhircefelkegyiptiqikrsrfykgneylkss |
| | ggeiadlwlsnvdlelmkehydlynveyisglkfkattglfkdfidkwtyikttsygaikqlakl |
| | mlnslygkfasnpdvtgkvpylkengalgfrlgeeetkdpvytpmgvfitawaryttitaaqa |
| | cydriiycdtdsihltgteipdvikdivdpkklgywehestfkrakylrqktyiqdiymkevdgy |
| | lvegspddytdikfsvkcagmtdkikkevtfenfkvgfsrkmkpkpvqvpggvvlvddtftik |
| Phi29.D66R_Y148I_Y224K_E239G_V250I_{—} | mkhmprkmyscdfetttkvedcrvwaygymniedhseykignsldefmawvlkvqadl |
| L253A_E375Y_A484E_D510K_{—} | yfhnlkfrgafiinwlerngfkwsadglpntyntiisrmgqwymidiclgykgkrkihtviydsl |
| K512Y.co | kklpfpvkkiakdfkltvlkgdidihkerpvgykitpeeyayikndiqiiaealliqfkqgldrmta |
| SEQ ID NO: 184 | gsdslkgfkdiittkkfkkvfptlslgldkevrkayrggftwlndrfkgkeigegmvfdinsayp |
| | aqmysrllpygepivfegkyvwdedyplhiqhircefelkegyiptiqikrsrfykgneylkss |
| | ggeiadlwlsnvdlelmkehydlynveyisglkfkattglfkdfidkwtyikttsygaikqlakl |
| | mlnslygkfasnpdvtgkvpylkengalgfrlgeeetkdpvytpmgvfitawaryttitaaqa |
| | cydriiycdtdsihltgteipdvikdivdpkklgywehestfkrakylrqktyiqdiymkevkgy |
| | lvegspddytdikfsvkcagmtdkikkevtfenfkvgfsrkmkpkpvqvpggvvlvddtftik |
| Phi29.N62D_Y148I_Y224K_E239G_V250I_{—} | mkhmprkmyscdfetttkvedcrvwaygymniedhseykignsldefmawvlkvqadl |
| L253A_E375Y_A484E_D510K_{—} | yfhdlkfdgafiinwlerngfkwsadglpntyntiisrmgqwymidiclgykgkrkihtviydsl |
| K512Y.co | kklpfpvkkiakdfkltvlkgdidihkerpvgykitpeeyayikndiqiiaealliqfkqgldrmta |
| SEQ ID NO: 185 | gsdslkgfkdiittkkfkkvfptlslgldkevrkavrggftwlndrfkgkeigegmvfdinsayp |
| | aqmysrllpygepivfegkyvwdedyplhiqhircefelkegyiptiqikrsrfykgneylkss |
| | ggeiadlwlsnvdlelmkehydlynveyisglkfkattglfkdfidkwtyikttsygaikqlakl |
| | mlnslygkfasnpdvtgkvpylkengalgfrlgeeetkdpvytpmgvfitawaryttitaaqa |
| | cydriiycdtdsihltgteipdvikdivdpkklgywehestfkrakylrqktyiqdiymkevkgy |
| | lvegspddytdikfsvkcagmtdkikkevtfenfkvgfsrkmkpkpvqvpggvvlvddtftik |
| Phi29.K143R_Y148I_Y224K_E239G_V250I_{—} | mkhmprkmyscdfetttkvedcrvwaygymniedhseykignsldefmawvlkvqadl |
| L253A_E375Y_A484E_D510K_{—} | yfhnlkfdgafiinwlerngfkwsadglpntyntiisrmgqwymidiclgykgkrkihtviydsl |
| K512Y.co | kklpfpvkkiakdfkltvlrgdidihkerpvgykitpeeyayikndiqiiaealliqfkqgldrmta |
| SEQ ID NO: 186 | gsdslkgfkdiittkkfkkvfptlslgldkevrkayrggftwlndrfkgkeigegmvfdinsayp |
| | aqmysrllpygepivfegkyvwdedyplhiqhircefelkegyiptiqikrsrfykgneylkss |
| | ggeiadlwlsnvdlelmkehydlynveyisglkfkattglfkdfidkwtyikttsygaikqlakl |
| | mlnslygkfasnpdvtgkvpylkengalgfrlgeeetkdpvytpmgvfitawaryttitaaqa |
| | cydriiycdtdsihltgteipdvikdivdpkklgywehestfkrakylrqktyiqdiymkevkgy |
| | lvegspddytdikfsvkcagmtdkikkevtfenfkvgfsrkmkpkpvqvpggvvlvddtftik |
| Phi29.D12N_Y224K_E239G_L253A_E375Y_{—} | mkhmprkmyscnfetttkvedcrvwaygymniedhseykignsldefmawvlkvqadl |
| A484E_K512Y.co | yfhnlkfdgafiinwlerngfkwsadglpntyntiisrmgqwymidiclgykgkrkihtviydsl |
| SEQ ID NO: 187 | kklpfpvkkiakdfkltvlkgdidyhkerpvgykitpeeyayikndiqiiaealliqfkqgldrmt |
| | agsdslkgfkdiittkkfkkvfptlslgldkevrkayrggftwlndrfkgkeigegmvfdvnsay |
| | paqmysrllpygepivfegkyvwdedyplhiqhircefelkegyiptiqikrsrfykgneylks |
| | sggeiadlwlsnvdlelmkehydlynveyisglkfkattglfkdfidkwtyikttsygaikqlakl |
| | mlnslygkfasnpdvtgkvpylkengalgfrlgeeetkdpvytpmgvfitawaryttitaaqa |
| | cydriiycdtdsihltgteipdvikdivdpkklgywehestfkrakylrqktyiqdiymkevdgy |
| | lvegspddytdikfsvkcagmtdkikkevtfenfkvgfsrkmkpkpvqvpggvvlvddtftik |
| Phi29.Y148F_Y224K_E239G_V250I_L253A_{—} | mkhmprkmyscdfetttkvedcrvwaygymniedhseykignsldefmawvlkvqadl |
| E375Y_A484E_D510K_K512Y.co | yfhnlkfdgafiinwlerngfkwsadglpntyntiisrmgqwymidiclgykgkrkihtviydsl |
| SEQ ID NO: 188 | kklpfpvkkiakdfkltvlkgdidfhkerpvgykitpeeyayikndiqiiaealliqfkqgldrmta |
| | gsdslkgfkdiittkkfkkvfptlslgldkevrkayrggftwlndrfkgkeigegmvfdinsayp |
| | aqmysrllpygepivfegkyvwdedyplhiqhircefelkegyiptiqikrsrfykgneylkss |
| | ggeiadlwlsnvdlelmkehydlynveyisglkfkattglfkdfidkwtyikttsygaikqlakl |
| | mlnslygkfasnpdvtgkvpylkengalgfrlgeeetkdpvytpmgvfitawaryttitaaqa |
| | cydriiycdtdsihltgteipdvikdivdpkklgywehestfkrakylrqktyiqdiymkevkgy |
| | lvegspddytdikfsvkcagmtdkikkevtfenfkvgfsrkmkpkpvqvpggvvlvddtftik |
| Phi29.Y148I_Y224K_E239G_V250I_L253A_{—} | mkhmprkmyscdfetttkvedcrvwaygymniedhseykignsldefmawvlkvqadl |
| E375Y_A484E_D510R_K512Y.co | yfhnlkfdgafiinwlerngfkwsadglpntyntiisrmgqwymidiclgykgkrkihtviydsl |
| SEQ ID NO: 189 | kklpfpvkkiakdfkltvlkgdidihkerpvgykitpeeyayikndiqiiaealliqfkqgldrmta |
| | gsdslkgfkdiittkkfkkvfptlslgldkevrkayrggftwlndrfkgkeigegmvfdinsayp |
| | aqmysrllpygepivfegkyvwdedyplhiqhircefelkegyiptiqikrsrfykgneylkss |
| | ggeiadlwlsnvdlelmkehydlynveyisglkfkattglfkdfidkwtyikttsygaikqlakl |
| | mlnslygkfasnpdvtgkvpylkengalgfrlgeeetkdpvytpmgvfitawaryttitaaqa |
| | cydriiycdtdsihltgteipdvikdivdpkklgywehestfkrakylrqktyiqdiymkevrgyl |
| | vegspddytdikfsvkcagmtdkikkevtfenfkvgfsrkmkpkpvqvpggvvlvddtftik |
| Phi29.Y148I_Y224K_E239G_V250I_L253A_{—} | mkhmprkmyscdfetttkvedcrvwaygymniedhseykignsldefmawvlkvqadl |
| E375Y_A484E_D510H_K512Y.co | yfhnlkfdgafiinwlerngfkwsadglpntyntiisrmgqwymidiclgykgkrkihtviydsl |
| SEQ ID NO: 190 | kklpfpvkkiakdfkltvlkgdidihkerpvgykitpeeyayikndiqiiaealliqfkqgldrmta |
| | gsdslkgfkdiittkkfkkvfptlslgldkevrkayrggftwlndrfkgkeigegmvfdinsayp |
| | aqmysrllpygepivfegkyvwdedyplhiqhircefelkegyiptiqikrsrfykgneylkss |
| | ggeiadlwlsnvdlelmkehydlynveyisglkfkattglfkdfidkwtyikttsygaikqlakl |
| | mlnslygkfasnpdvtgkvpylkengalgfrlgeeetkdpvytpmgvfitawaryttitaaqa |
| | cydriiycdtdsihltgteipdvikdivdpkklgywehestfkrakylrqktyiqdiymkevhgy |
| | lvegspddytdikfsvkcagmtdkikkevtfenfkvgfsrkmkpkpvqvpggvvlvddtftik |
| Phi29.Y148I_Y224K_E239G_V250I_L253A_{—} | mkhmprkmyscdfetttkvedcrvwaygymniedhseykignsldefmawvlkvqadl |
| E375Y_A484E_E508K_D510K_{—} | yfhnlkfdgafiinwlerngfkwsadglpntyntiisrmgqwymidiclgykgkrkihtviydsl |
| K512Y.co | kklpfpvkkiakdfkltvlkgdidihkerpvgykitpeeyayikndiqiiaealliqfkqgldrmta |
| SEQ ID NO: 191 | gsdslkgfkdiittkkfkkvfptlslgldkevrkayrggftwlndrfkgkeigegmvfdinsayp |
| | aqmysrllpygepivfegkyvwdedyplhiqhircefelkegyiptiqikrsrfykgneylkss |
| | ggeiadlwlsnvdlelmkehydlynveyisglkfkattglfkdfidkwtyikttsygaikqlakl |
| | mlnslygkfasnpdvtgkvpylkengalgfrlgeeetkdpvytpmgvfitawaryttitaaqa |
| | cydriiycdtdsihltgteipdvikdivdpkklgywehestfkrakylrqktyiqdiymkkvkgyl |
| | vegspddytdikfsvkcagmtdkikkevtfenfkvgfsrkmkpkpvqvpggvvlvddtftik |

[0380] Additional exemplary polymerase mutations and/or combinations thereof are provided in FIG. 35; positions of the mutations are identified relative to a wild-type Φ29 DNA polymerase (SEQ ID NO:1). Where the feature “topo V fusion” is listed, it indicates that the polymerase includes a fusion as described in de Vega et al. (2010) “Improvement of φ29 DNA polymerase amplification performance by fusion of DNA binding motifs” Proc Natl Acad Sci USA 107:16506-16511. “pET16” refers to a vector used to produce a recombinant Φ29 polymerase comprising the indicated mutations, and “co” indicates that the polynucleotide sequence encoding certain features has been codon optimized; neither notation is relevant to the structure of the polymerase, nor are the mutations or combinations of mutations shown in FIG. 35 limited to use in a Φ29 polymerase. Essentially any of these mutations, any combination of these mutations, and/or any combination of these mutations with the other mutations disclosed herein can be introduced into a polymerase (e.g., Φ29-type polymerase) to produce a modified recombinant polymerase in accordance with the invention.

### EXAMPLES

[0381] It is understood that the examples and embodiments described herein are for illustrative purposes only and that various modifications or changes in light thereof will be suggested to persons skilled in the art and are to be included within the spirit and purview of this application and scope of the appended claims. Accordingly, the following examples are offered to illustrate, but not to limit, the claimed invention.

### Example 1

### Determination of Branching Fractions for Modified Recombinant Polymerases

[0382] An active polymerase:template:analog ternary complex can be created in a ‘static’ non-extending (a.k.a ‘sampling’) configuration by including in the reaction a divalent cation that supports access of analog bases into the binding pocket but does not have sufficient coordination capability to allow the active configuration of the analog be assumed. The divalent cation that most efficiently fulfills this function for a polymerase extension reaction is calcium.

[0383] To perform a branching fraction assay, this static structure is leveraged by (for any variant being tested) initiating such a reaction that precludes extension, then (at a fixed time point) ‘chasing’ this state with saturating amounts of a dideoxy-nucleotide (or other non-hydrolyzable analog), extendable base analogs, and a divalent cation that supports product extension. The simultaneous addition of these three components results in sites that are unoccupied at the time of the ‘chase’ being terminated by the rapid, high-affinity binding of the non-hydrolyzable analog. This results in generation of a product that is only a single base longer then the original primer. Sites that are ‘occupied’ (i.e. contain the cognate, but unpaired, analog base) will (as a result of the ‘chase’ reaction) proceed with extension (the resident analog base completes chemistry with the free 3′ OH group of the primer) and thereby generates a product that can be detected as a two (or more)-base addition(s). The ratio of the amount of these two products is used to estimate the proportion of unoccupied and occupied sites at an equilibrium state and therefore is proportional to the rate of branching. The assay is schematically illustrated in FIG. 11 Panel A.

[0384] Materials and Methods

[0385] In general, branching fraction can be determined as follows. Combine polymerase sample with 1 mM calcium chloride, the analog for testing, and an appropriate template:primer where the bases at position +1 and +2 are complementary to the test analog. Incubate at optimum polymerase reaction temperature for 5 minutes. Add to this reaction an equal volume of the same formulation containing 20-fold level of manganese over the calcium chloride concentration and 0.5 mM of a non-hydrolyzable nucleotide (of the same base as the analog being tested). Incubate at same temperature for 30 seconds. Terminate the reaction either by adding EDTA to a final concentration of 100 mM or by adding a denaturing reagent such as formamide. Analyze samples to determine the amounts of the +1 and +2 products—this can be done by acrylamide gel electrophoresis (FIG. 11 Panel B) or capillary electrophoresis. The branching fraction is calculated as the proportion of the amount of the +1 product to the total amount of products formed (+1++2), i.e., branching fraction=P₊₁/(P₊₁+P₊₂).

[0386] Branching fraction data presented for the Φ29 polymerase mutants in Table 5 was determined accordingly, under the following conditions. The analog, template, and primer employed were analog A555-dT6P, template 5′-ACGACGTTGACAATAATACAAGTCCGATACATGATAATTACCGATAAGTTCGTC GAGAGCACATTAGGCTGGCTG G-3′ (SEQ ID NO:194), and primer 5′ 6-FAM/CCAGCCAGCCTAATGTGCTCTCGACGAACTTATCGGTAATTATCATGTATC GGA C-3′ (SEQ ID NO:195). Combine 130 nM Polymerase with 40 nM annealed Template:Primer in a solution containing 1 mM CaCl₂, 5 uM Analog, 0.095% Triton X-100, 75 mM Potassium Acetate, 5 mM DTT in 50 mM ACES pH 7.25 at a volume of 20 uL. Incubate at room temperature for 5 minutes. In a separate tube, combine 20 mM MnCl₂ with 0.5 mM 3′-amino-2′ ddTTP in 50 mm ACES pH 7.25. At the completion of the 5 minute incubation step, transfer 20 uL of the second mix to the first. Incubate for 30 seconds at room temperature. Add EDTA to 5 mM to quench the reaction. Analyze samples by separating fragments by capillary electrophoresis and calculating integrated peak areas of the products.

### Example 2

### Polymerase Systems Having Two Kinetically Observable Steps—Stopped Flow Measurements

[0387] This experiment describes the observation of a polymerase system having two kinetically observable steps (two slow steps) where the two kinetically observable steps occur while the nucleotide is associated with the enzyme (after nucleotide binding and through product release). In the experiment described here, the two kinetically observable steps would correspond to steps occurring in the bright state of a single-molecule sequencing system using nucleotides having dyes attached to the terminal phosphate of the nucleotides.

[0388] The oligonucleotides that constitute the template/primer complex were purchased from Integrated DNA Technologies (Coralville, Iowa). The position iAmMC6T has an Int amino modified C6 dT substituted for dT at this position. The “template” oligonucleotide was labeled at position “iAmMC6T” with alexa fluor 488 fluorescent dye. Sequence of oligonucleotides used for the assays were

(SEQ ID NO: 196)

5′-GGT GAT GTA GAT AGG TGG TAG GTG GTG
TCA GAT C

(SEQ ID NO: 197)

3′-CCA CTA CAT CTA TCC ACC ATC CAC CAC
AG/iAmMC6T/CTA GGC ATA ATA ACA GTT GCA GCA.

[0389] This stopped-flow assay relies on the quenching, for example by fluorescent resonance energy transfer (FRET) of the fluorescence of the Alexa fluor 488 attached to the template by a dye labeled nucleotide. A nucleotide having an Alexa fluor 555 as a terminal phosphate label is used in the polymerase reaction, which will quench the fluorescence of the Alexa fluor 488 dye attached to the template only when the nucleotide is associated with (bound to) the polymerase enzyme.

[0390] For this assay a SF-2004 stopped-flow instrument (Kintek Corp, Austin, Tex.) is used to monitor the fluorescence at 535 nm (using a band pass filter), to measure Alexa fluor 488 emission. The enzyme, DNA, buffer, potassium acetate, and dithiothreitol (DTT) are mixed in one sample and allowed to equilibrate. Alexa-555-dC6P (a terminally labeled hexaphosphate nucleotide substrate), buffer, potassium acetate, DTT, MnCl₂, and CaCl₂ are mixed in a second sample. The stopped-flow instrument rapidly mixes these samples and reads the fluorescent signal at 535 nm as a function of time.

[0391] The drop in the fluorescent signal, measured at 535 nM, is attributed to binding of the Alexa-555-dC6P nucleotide to the enzyme-DNA complex. Because quenching only occurs when the two dyes are in close proximity, a significant drop in the fluorescence of alexa fluor 488 due to the presence of alexa fluor 555 in solution would not be expected to occur. Alexa-555-dC6P bound in the active site of the enzyme, however, will cause a drop in the fluorescence of alexa fluor 488 labeled oligonucleotide. The rate of drop of the measured fluorescence signal is a function of the rate of binding of the nucleotide to the active site of the enzyme.

[0392] Once bound, the nucleotide analog can undergo nucleotidyl transfer catalyzed by the polymerase enzyme, extending the oligonucleotide. Subsequent to extension of the oligonucleotide, the product, the alexa fluor 555-pentaphosphate is released from the enzyme. Once released from the enzyme DNA complex, the alexa fluor 555-pentaphosphate no longer quenches the alexa fluor 488 attached to the template in the enzyme-DNA complex, and the measured fluorescence signal increases at a rate that is a function of the release of product.

[0393] The binding of the nucleotide to the enzyme-DNA complex is often observed to occur as a single exponential decrease in the fluorescence signal, indicating a process with a single kinetically observable step. Where the steps of the polymerase reaction from after binding through release of the pentaphosphate-dye molecule are governed by a single rate limiting step a single exponential increase in the fluorescent signal is expected. Thus, in the scenario where nucleotide binding and the subsequent steps through product release are each governed by single rate limiting steps, a fluorescent signal that is adequately described by a sum of two exponentials is observed.

[0394] FIG. 15 shows the data from a polymerase reaction system in which the decrease in the fluorescent signal fits to a single exponential having an observed rate constant of 156±3 s⁻¹, and the increase in signal fits to a single exponential having an observed rate constant of 8.5±0.1s⁻¹. FIG. 15 includes both the experimental data and the curve fits for single exponential decay and rise in fluorescence. The polymerase reaction shown in FIG. 15 involved a modified phi29 DNA polymerase having the mutations N62D/T368F/E375Y/K512Y and modified for streptavidin binding (polymerase R) in 50 mM ACES buffer at a pH of 7.1. The assay was performed with the following components and amounts: 0.125 μM polymerase R enzyme, 0.025 μM DNA, 50 mM ACES, pH 7.1, 0.7 mM MnCl₂, 75 mM potassium acetate, 5 mM dithiothreitol, 3 μM alexa 555-dC6P. The observed fluorescent signal was fit to a sum of two exponentials, where the rate of the drop is 156±3 s⁻¹, and the rate of the increase in signal is 8.5±0.1s⁻¹.

[0395] FIG. 16 shows the data for a polymerase reaction system which exhibits two kinetically observable steps for the steps after nucleotide binding through product release. The polymerase reaction used the enzyme polymerase R in 50 mM Tris buffer, at pH 7.1, with 0.25 mM CaCl₂. The assay used 0.125 μM polymerase R enzyme, 0.025 μM DNA, 50 mM Tris, pH 7.1, 0.7 mM MnCl₂, 0.25 mM CaCl₂, 75 mM potassium acetate, 5 mM dithiothreitol, 3 μM alexa 555-dC6P. A good fit to the data could not be obtained with two exponentials. However, a good quality fit was obtained using the sum of three exponentials. The drop in fluorescence occurs with a single exponential having an observed rate constant of 172±12 s⁻¹. The increase in fluorescence is best described as the sum of two exponentials, where the faster of the two steps occurs with an observed rate constant of 60±10 s⁻¹, and the slower of the two steps occurs with an observed rate constant of 12.0±0.1s⁻¹. The behavior of this system is best described by two kinetically observable steps during the part of the polymerase reaction in which the nucleotide is associated with the enzyme. Each of the steps is partially rate limiting. The observed fluorescent signal is fit to a sum of three exponentials, where the observed rate constant for the drop in fluorescence is 172±12 s⁻¹, and the increase in fluorescence exhibits two kinetically observable rate constants, one at 60±10 s⁻¹ and the other at 12.0±0.1s⁻¹.

[0396] FIG. 17 shows stopped-flow experimental data for a polymerase having a drop in fluorescence and a rise in fluorescence which each can be fit to a single exponential. FIG. 17 shows the incorporation of Alexa 555-dC6P by a phi29 DNA polymerase enzyme having the mutations N62D/T368F/E375Y/A484E/K512Y and modified for streptavidin binding (polymerase T) in 50 mM Tris buffer, pH 7.1. The assay used 0.125 μM polymerase T enzyme, 0.025 μM DNA, 50 mM Tris, pH 7.1, 0.7 mM MnCl₂, 75 mM potassium acetate, 5 mM dithiothreitol, 3 μM alexa 555-dC6P. The observed fluorescent signal is fit to a sum of two exponentials, where the rate of the drop has an observed rate constant of 118±4 s−1, and the increase in the signal rate limiting step occurs with an observed rate constant of 46±1s−1.

[0397] FIG. 18 illustrates how changing the polymerase reaction conditions can produce a polymerase reaction system which exhibits two kinetically observable rate limiting steps for the steps after nucleotide binding through product release. In this case, without limitation to any particular mechanism, it is believed that specific enzyme mutations in the polymerase T enzyme, coupled with the presence of Ca++ under the conditions of the polymerase reaction described, has changed the kinetic performance of the system to obtain a system in which there are two kinetically observable rate constants between nucleotide binding through product release with almost equal rate constants. FIG. 18 shows stopped-flow data for the incorporation of Alexa 555-dC6P by polymerase enzyme polymerase Tin 50 mM Tris buffer, pH 7.1, with 1.25 mM CaCl₂. The assay used 0.125 μM polymerase T enzyme, 0.025 μM DNA, 50 mM Tris, pH 7.1, 0.7 mM MnCl₂, 1.25 mM CaCl₂, 75 mM potassium acetate, 5 mM dithiothreitol, 3 μM alexa 555-dC6P. FIG. 18 Panel A shows an attempt to fit the data with two exponentials, one for the decay, and the other for the rise in fluorescence. It can be seen from FIG. 18 Panel A that the data is not well described in this manner. FIG. 18 Panel B shows the observed fluorescent signal fit to a sum of three exponentials where the rate constant for the drop in fluorescence is 157±5 s⁻¹, and the increase in the signal exhibits two kinetically observable steps, where one step exhibits an observed rate constant of 9±2 s⁻¹ and the other step exhibits a rate constant of 7±1s⁻¹. The conditions that resulted in the two kinetically observable steps of FIG. 18 Panel B are the same as those for the experiment shown in FIG. 17, except for the presence of CaCl₂ at a concentration of 1.25 mM in this experiment.

[0398] A similar stopped-flow experiment was performed with a modified Φ29 DNA polymerase having the mutations N62D/T368F/E375Y/K512Y/N387L in Tris buffer at a pH of 7.1 with 0.5 mM MnCl₂ and no added CaCl₂. Data was fit with three exponentials, revealing a ratio between the two slow rates of about 0.5.

### Example 3

### Stopped Flow Experiment to Observe Two Kinetically Observable Steps for the Steps after Product Release Through Nucleotide Binding

[0399] The presence of two kinetically observable steps after product release through nucleic acid binding can be observed by measuring the difference in the kinetics of single incorporation and multiple incorporations. First, a transient incorporation nucleotide incorporation assay (rapid chemical quench flow or stopped-flow fluorescence) is performed in order to determine the apparent rate constant for binding of a first nucleotide. Next, the experiment is run such that two nucleotides are incorporated. By comparing the kinetic parameters for the incorporation of two nucleotides as compared to those for incorporating one nucleotide, it can be determined whether there is an intervening step, such as translocation or isomerization, which significantly limits the rate. Where such a step is identified, the pseudo first order rate constant of the nucleotide binding step can be lowered by lowering the concentration of nucleotide. In this manner, a system having two slow steps in the phase after product release and through nucleotide binding can be produced by matching the apparent rate constant of nucleotide binding with that the preceding isomerization or translocation event.

### Example 4

### High Throughput Screen for Polymerase Mutants with Slow Product Release

[0400] As described above, polymerases exhibiting slow release of polyphosphate product are of particular interest, e.g., in producing polymerases exhibiting two slow steps for use in single molecule sequencing. Screening polymerase mutants using a stopped-flow assay to determine kinetic parameters, however, can be time-consuming. A higher throughput format for identifying polymerase variants exhibiting slow product release has thus been developed.

[0401] In the screen, each candidate polymerase mutant is employed in a primer extension reaction using a DNA template (e.g., a circular DNA template) and four dNTPs or analogs, in the presence or absence of a competitive inhibitor. Nucleotide incorporation is measured based upon elongation rate of the polymerization reaction, as determined from the change in synthesis product size (e.g., as determined by agarose gel electrophoresis).

[0402] Suitable competitive inhibitors include, but are not limited to, Z-6-aminohexylpentaphosphate (Cbz-X-5P, FIG. 19 Panel A). Synthesis of Cbz-X-5P has been described in U.S. patent application Ser. No. 12/370,472, which also describes additional exemplary inhibitors. Without limitation to any particular mechanism, Cbz-X-5P mimics the polyphosphate reaction product and competes with dNTP binding, slowing primer extension. The assay is predicated on product affinity as an indication of slow product release; that is, mutants with slower product release are expected to have greater affinity for the competitive inhibitor and thus show a slower extension rate. Candidate mutants identified by the primer extension screen as potentially having decreased product release rates can be verified if desired, e.g., by stopped-flow measurements. The screen is optionally automated or partially automated.

[0403] Illustrative results are shown in FIG. 19 Panels B and C. DNA primer extension reactions were carried out using a circular template and a Φ29 polymerase in the presence of 5 μM native nucleotides (dNTPs), MnCl₂, ACES pH 7.1, 75 mM potassium acetate, and various concentrations of Cbz-X-5P (0 μM, 60 μM, and 120 μM). Products were analyzed by agarose gel electrophoresis.

[0404] As shown in FIG. 19 Panel B, for parental Φ29 polymerase N62D/E375Y/K512Y/T368F, increased concentration of the competitive inhibitor yielded a reduction in the size of the extension product. (A molecular weight standard is shown in the leftmost lane.) As shown in FIG. 19 Panel C, no product for modified Φ29 N62D/E375Y/K512Y/T368F/A484E is seen on inclusion of the competitive inhibitor. The strong inhibition of primer extension by Cbz-X-5P agrees with results of stopped-flow experiments for this mutant.

### Example 5

### Nucleic Acid Sequencing Using Φ29 Polymerase Mutants Of the Invention

[0405] A number of Φ29 polymerase mutants were characterized using single molecule sequencing. These experiments employed a sequencing system in which the polymerase is confined within a zero-mode waveguide (ZMW), and incorporation of fluorescently labeled nucleotide analogs is monitored in real time via an optical system configured to illuminate a plurality of ZMWs on a chip and detect optical signals (corresponding to nucleotide incorporation events) emanating therefrom. See Eid et al. (2009) “Real-time DNA sequencing from single polymerase molecules” Science 323:133-138 and supplemental information.

[0406] For example, in one set of experiments, an enzyme having an L253 mutation was tested under two experimental conditions. In the first experiment, the enzyme was tested with an on-chip control with a 1 kb PhiX174 template and 1 kb All5merA template. In the second experiment, the enzyme was examined with a genomic 2 kB lambda library. The templates were incorporated into SMRTbell circular single stranded templates as described in U.S. Patent No. 2009/0298075. The All5merA template is a synthetic template produced to represent all 5-mer permutations. The results of these studies are provided in Table 20 and indicate consistent activity of this polymerase.

TABLE 20
Single Molecule Sequencing Results

| | | | Median | |
|---|---|---|---|---|
| | | | Unrolled | Mean Unrolled |
| | N Reads | Median Acc | Readlength | Readlength |
| Experiment 1 | 14899 | 84.30% | 1029 | 1115 |
| Experiment 2 | 13991 | 84.10% | 1017 | 1101 |

[0407] N Reads refers to the number of sequencing reads per experiment. Median Acc is the median accuracy of the sequences generated by the sequencing system during each study, while readlengths are provided in the two right-most columns. The median and mean readlengths include the reads of the hairpin regions of the SMRTbell templates.

### Example 6

### Characterization of Exemplary Recombinant Polymerases in Single Molecule Sequencing Reactions

[0408] Recombinant polymerases based on Φ29 polymerase and including various combinations of mutations were expressed and purified as described below. Polymerase yields were estimated from SYPRO®-stained gels. Activity of the polymerase in solution was assessed in a strand displacement assay. Exemplary yield and activity data are presented in Table 21.

TABLE 21
Yield from high throughput purification procedure (concentration, nM) and
strand displacement activity for exemplary recombinant polymerases.

| | | Activity | Conc. |
|---|---|---|---|
| | Mutations and exogenous features | (nM) | (nM) |
| P1 | Btag.His10co.N62D_V250I_L253A_E375Y_A484E_K512Y.co | 183 | 427 |
| P2 | BtagV7co.His10co.CTerm_His10co.Phi29.L253A_E375Y_A484E_K512Y.co | 71 | 278 |
| P3 | Btagco.His10co.CTerm_His10co.Phi29.Y148I_L253A_E375Y_A484E_K512Y.co | 0 | 450 |
| P4 | Btagco.His10co.CTerm_His10co.Phi29.L253A_E375Y_A484E_K512Y_E515K.co | 763 | 4541 |
| P5 | BtagV7co.His10co.CTerm_His10co.Phi29.E239G_L253A_E375Y_A484E_E508R_K512Y.co | 119 | 369 |
| P6 | BtagV7co.His10co.CTerm_His10co.Phi29.Y224K_E239G_L253A_E375Y_A484E_D510K_K512Y.co | 89 | 617 |
| P7 | BtagV7co.His10co.CTerm_His10co.Phi29.Y224K_E239G_L253A_E375Y_A484E_K512Y_F526L.co | 615 | 2312 |
| P8 | BtagV7co.His10co.CTerm_His10co.Phi29.E239G_L253A_E375Y_A484E_D510K_K512Y.co | 41 | 246 |
| P9 | BtagV7co.His10co.CTerm_His10co.Phi29.Y148I_Y224K_E239G_V250I_L253A_E375Y_A484E_D510K_K512Y.co | 193 | 587 |
| P10 | BtagV7co.His10co.CTerm_His10co.Phi29.Y148F_Y224K_E239G_V250I_L253A_E375Y_A484E_D510K_K512Y.co | 314 | 928 |
| P11 | BtagV7co.His10co.CTerm_His10co.Phi29.D12N_Y224K_E239G_L253A_E375Y_A484E_K512Y.co | 1118 | 3103 |
| P12 | BtagV7co.His10co.CTerm_His10co.Phi29.- | 946 | 3283 |
| | Y148I_Y224K_E239G_V250I_L253A_E375Y_A484E_E508K_D510K_K512Y.co | | |
| P13 | BtagV7co.His10co.CTerm_His10co.Phi29.- | 409 | 1206 |
| | Y148I_Y224K_E239G_V250I_L253A_E375Y_A484E_D510K_K512Y_E515Q.co | | |
| P14 | BtagV7co.His10co.CTerm_His10co.Phi29.- | 177 | 677 |
| | N62D_Y148I_Y224K_E239G_V250I_L253A_E375Y_A484E_D510K_K512Y.co | | |
| P15 | BtagV7co.His10co.CTerm_His10co.Phi29.- | 149 | 597 |
| | D66R_Y148I_Y224K_E239G_V250I_L253A_E375Y_A484E_D510K_K512Y.co | | |
| P16 | BtagV7co.His10co.CTerm_His10co.Phi29.- | 134 | 678 |
| | K143R_Y148I_Y224K_E239G_V250I_L253A_E375Y_A484E_D510K_K512Y.co | | |
| P17 | BtagV7co.His10co.CTerm_His10co.Phi29.Y148I_Y224K_E239G_L253C_E375Y_A484E_D510K_K512Y.co | 166 | 1005 |
| P18 | BtagV7co.His10co.CTerm_His10co.Phi29.Y148I_Y224K_E239G_V250I_L253A_E375Y_A484E_D510R_K512Y.co | 282 | 905 |
| P19 | BtagV7co.His10co.CTerm_His10co.Phi29.Y148I_Y224K_E239G_V250I_L253A_E375Y_A484E_D510H_K512Y. co | 476 | 1452 |
| P20 | BtagV7co.His10co.CTerm_His10co.Phi29.L253A_E375Y_A484E_D510K_K512Y.co | * | * |

* Yield of this polymerase (P20) was extremely low; a large scale purification procedure was required instead of the high throughput procedure described below.

[0409] The polymerases were further characterized by use in single molecule sequencing. Single molecule sequencing data was obtained with recombinant Φ29 polymerases including the mutation combinations listed in FIG. 35. Exemplary data are presented in Table 22. Data for each polymerase is presented along with data for a control polymerase, acquired from the same chip for comparison. nReads represents the number of ZMWs from which single molecule sequencing data was obtained. Accuracy and readlength are determined using data for those reads meeting selected performance criteria. Readlength is generally correlated with polymerase speed for the short runs performed during initial characterization (five to seven minutes).

TABLE 22
Single molecule sequencing with exemplary
recombinant polymerases.

| | | | | | | Control | Control |
|---|---|---|---|---|---|---|---|
| | | Read | Accura- | Control | Control | Read- | Accu- |
| Pol.^{a} | nReads | length^{b} | cy (%) | Pol.^{c} | nReads | length | racy |
| P1 | 504 | 266 | 82.2 | P21 | 89 | 244 | 84.46 |
| P2 | 66 | 547 | 88 | P2 | 478 | 384.5 | 87.36 |
| P3 | 64 | 185 | 84.65 | P22 | 266 | 208 | 81.73 |
| P4 | 405 | 263 | 88.11 | P2 | 74 | 254 | 87.7 |
| P5 | 155 | 397 | 86.26 | P2 | 136 | 231 | 84.85 |
| P6 | 380 | 612.5 | 86.4 | P8 | 477 | 478 | 86.24 |
| P7 | 383 | 292 | 83.77 | P2 | 69 | 326 | 82 |
| P8 | 177 | 614 | 84.04 | P8 | 177 | 614 | 84.04 |
| P9 | 255 | 883 | 86.42 | P2 | 319 | 454 | 86.34 |
| P10 | 120 | 786 | 86 | P9 | 448 | 699 | 87 |
| P11 | 517 | 223 | 88 | P2 | 156 | 349 | 87 |
| P12 | 163 | 654 | 85 | P9 | 425 | 577 | 86 |
| P13 | 277 | 278 | 87 | P9 | 187 | 406 | 87 |
| P14 | 177 | 493 | 87 | P9 | 442 | 572 | 86 |
| P15 | 131 | 291 | 89 | P9 | 568 | 493 | 88 |
| P16 | 141 | 510 | 89 | P9 | 522 | 488 | 88 |
| P17 | 196 | 384 | 88 | P9 | 536 | 400 | 88 |
| P18 | 87 | 404 | 89 | P9 | 480 | 276 | 89.17 |
| P19 | 140 | 401 | 89 | P9 | 539 | 330 | 88.4 |
| P20 | 1220^{d} | 1926^{d} | 83.34^{d} | P2 | 2446^{d} | 1337^{d} | 83.98^{d} |

^{a}Polymerases are identified as in Table 21.
^{b}Readlength in nucleotides.
^{c}Additional control polymerases are P21, Btagco.His10co.CTerm_His10.Phi29.N62D_L253A_E375Y_A484E_K512Y.co and P22, Btagco.His10co.CTerm_His10.Phi29.L253A_E375Y_A484E_K512Y.co
^{d}Data shown for this polymerase (P20 and control) is from a set of 30 minute movies, rather than a seven minute movie.

[0410] Recombinant polymerases based on M2Y polymerase have also been produced and characterized, basically as described for the recombinant Φ29 polymerases. Although tagged wild-type M2Y polymerase failed to sequence under these conditions, as shown in Table 23, an M2Y mutant polymerase including L253A, E375Y, A484E, and K512Y substitutions produced single molecule sequencing data. (Positions are identified relative to wild-type Φ29 polymerase; actual residue numbers in M2Y are 250, 372, 481, and 509. See FIG. 43 for an alignment of the wild-type Φ29 and M2Y polymerase sequences.) The mutant M2Y polymerase was compared to an on-chip control Φ29 polymerase including similar mutations (L253A, E375Y, A484E, and K512Y plus a C-terminal His10 tag).

TABLE 23
Characterization of M2Y recombinant polymerase.

| | Concentration | Activity | | Readlength | Accuracy |
|---|---|---|---|---|---|
| | (nM) | (nM) | nReads | (bases) | (%) |
| M2Y^{a} | 7862 | 2480 | | | |
| mutant | 4573 | 2250 | 32 | 139 | 88.46 |
| M2Y^{b} | | | | | |
| mutant | | | 109 | 345 | 88.15 |
| Φ29^{c} | | | | | |

^{a}wild-type M2Y: pET16.BtagV7co.His10co.M2.co
^{b}mutant M2Y: pET16.BtagV7co.His10co.M2.L250A_E372Y_A481E_K509Y.co
^{c}mutant Φ29 control: pET16.BtagV7co.His10co.CTerm_His10co.Phi29.L253A_E375Y_A484E_K512Y.co

[0411] Materials and Methods

[0412] Molecular Cloning

[0413] The phi29 polymerase gene was cloned into either pET16 or pET11 (Novagen). Primers for specified mutations are designed and introduced into the gene using the Phusion Hot Start DNA Polymerase Kit (New England Biolabs). A PCR reaction is performed to incorporate mutations and product is purified using ZR-96 DNA Clean and Concentration Kits (Zymo Research). PCR products are digested with NdeI/BamHI and ligated into the vector. Plasmids are transformed into TOP10 E. coli competent cells, plated on selective media and incubated at 37° C. overnight. Colonies are selected and plasmid is purified using Qiagen miniprep kits. Plasmids are then sequenced (Sequetech).

[0414] Protein Purification

[0415] Plasmid containing the recombinant phi29 gene is transformed into BL21 Star21 CDE3+Biotin Ligase cells (Invitrogen) using heat shock. Transformed cells are grown in selective media overnight at 37° C. 200 μL of the overnight culture are diluted into 4 mL of Overnight Express Instant TB Medium (EMD Chemicals) and grown at 37° C. until controls reach O.D. value of 4-6. Cultures are then incubated at 18° C. for 16 hours. Following this incubation, cells are harvested, resuspended in buffer, and frozen at −80° C. Cells are thawed and lysed. Following lysis, cells are centrifuged and supernatant is collected. Polymerase is purified over nickel followed by heparin columns. The resulting proteins are run on gels and quantified by SYPRO® staining.

[0416] Single Molecule Sequencing

[0417] Enzymes are characterized by single molecule sequencing basically as described in Eid et al. (2009) Science 323:133-138 (including supplemental information), using commercially available reagents (from SMRT™ sequencing kits, Pacific Biosciences of California, Inc.). Each enzyme is initially screened with a single 5-7 minute movie, followed by secondary screening with 30 minute replicates where applicable. Enzymes are evaluated, e.g., based on readlength and accuracy compared to control enzymes.

[0418] While the foregoing invention has been described in some detail for purposes of clarity and understanding, it will be clear to one skilled in the art from a reading of this disclosure that various changes in form and detail can be made without departing from the true scope of the invention. For example, all the techniques and apparatus described above can be used in various combinations. All publications, patents, patent applications, and/or other documents cited in this application are incorporated by reference in their entirety for all purposes to the same extent as if each individual publication, patent, patent application, and/or other document were individually indicated to be incorporated by reference for all purposes.

1. A composition comprising a recombinant Φ29-type DNA polymerase, which recombinant polymerase comprises a mutation at position E375, a mutation at position K512, and a mutation at one or more positions selected from the group consisting of L253, A484, V250, E239, Y224, Y148, E508, and T368, wherein identification of positions is relative to wild-type Φ29 polymerase (SEQ ID NO:1).

2. The composition of claim 1, wherein the mutation at position E375 comprises an amino acid substitution selected from the group consisting of E375Y, E375F, E375R, E375Q, E375H, E375L, E375A, E375K, E375S, E375T, E375C, E375G, and E375N.

3. The composition of claim 1, wherein the mutation at position K512 comprises an amino acid substitution selected from the group consisting of K512Y, K512F, K512I , K512M, K512C, K512E, K512G, K512H, K512N, K512Q, K512R, K512V, and K512H.

4. The composition of claim 1, wherein the mutation at position E375 comprises an E375Y substitution and the mutation at position K512 comprises a K512Y substitution.

5. The composition of claim 1, wherein the recombinant polymerase comprises one or more amino acid substitutions selected from the group consisting of L253A, L253C, L253S, A484E, A484Q, A484N, A484D, A484K, V250I , V250Q, V250L, V250M, V250C, V250F, V250N, V250R, V250T, V250Y, E239G, Y224K, Y224Q, Y224R, Y148I , Y148A, Y148K, Y148F, Y148C, Y148D, Y148E, Y148G, Y148H, Y148K, Y148L, Y148M, Y148N, Y148P, Y148Q, Y148R, Y148S, Y148T, Y148V, Y148W, E508R, and E508K.

6. The composition of claim 1, wherein the recombinant polymerase comprises a mutation at one or more positions selected from the group consisting of D510, E515, and F526, wherein identification of positions is relative to wild-type Φ29 polymerase (SEQ ID NO:1).

7. The composition of claim 6, wherein the recombinant polymerase comprises one or more amino acid substitutions selected from the group consisting of D510K, D510Y, D510R, D510H, D510C, E515Q, E515K, E515D, E515H, E515Y, E515C, E515M, E515N, E515P, E515R, E515S, E515T, E515V, E515A, F526L, F526Q, F526V, F526K, F526I, F526A, F526T, F526H, F526M, F526V, and F526Y.

8. The composition of claim 1, wherein the recombinant polymerase comprises a mutation at one or more positions selected from the group consisting of N62, D12, D66, and K143, E14, H61, D169, Y148, and H149, wherein identification of positions is relative to wild-type Φ29 polymerase (SEQ ID NO:1).

9. The composition of claim 1, wherein the recombinant polymerase comprises a combination of mutations selected from the group consisting of:
a) L253A, E375Y, A484E, and K512Y;
b) L253A, E375Y, A484E, D510K, and K512Y;
c) Y148I , Y224K, E239G, V250I , L253A, E375Y, A484E, D510K, and K512Y;
d) Y148I , Y224K, E239G, V250I , L253A, E375Y, A484E, D510K, K512Y, and E515Q;
e) E239G, L253A, E375Y, A484E, D510K, and K512Y;
f) Y224K, E239G, L253A, E375Y, A484E, D510K, and K512Y;
g) Y148I , Y224K, E239G, L253C, E375Y, A484E, D510K, and K512Y;
h) N62D, V250I , L253A, E375Y, A484E, and K512Y;
i) Y224K, E239G, L253A, E375Y, A484E, K512Y, and F526L;
j) L253A, E375Y, A484E, K512Y, and E515K;
k) E239G, L253A, E375Y, A484E, E508R, and K512Y;
l) Y148I , L253A, E375Y, A484E, and K512Y;
m) D66R, Y148I , Y224K, E239G, V250I , L253A, E375Y, A484E, D510K, and K512Y;
n) N62D, Y148I , Y224K, E239G, V250I , L253A, E375Y, A484E, D510K, and K512Y;
o) K143R, Y148I , Y224K, E239G, V250I , L253A, E375Y, A484E, D510K, and K512Y;
p) D12N, Y224K, E239G, L253A, E375Y, A484E, and K512Y;
q) Y148F, Y224K, E239G, V250I , L253A, E375Y, A484E, D510K, and K512Y;
r) Y148I, Y224K, E239G, V250I , L253A, E375Y, A484E, D510R, and K512Y;
s) Y148I, Y224K, E239G, V250I , L253A, E375Y, A484E, D510H, and K512Y; and
t) Y148I, Y224K, E239G, V250I , L253A, E375Y, A484E, E508K, D510K, and K512Y.

10. The composition of claim 9, wherein the recombinant polymerase is at least 80% identical to wild-type Φ29 polymerase (SEQ ID NO:1).

11. The composition of claim 10, wherein the C-terminal region of the recombinant polymerase comprises a His10 tag.

12. The composition of claim 1, wherein the recombinant polymerase comprises an amino acid sequence selected from the group consisting of SEQ ID NOs:133-193.

13. (canceled)

14. The composition of claim 1, wherein the recombinant polymerase is at least 80% identical to wild-type Φ29 polymerase (SEQ ID NO:1).

15. The composition of claim 1, wherein the recombinant polymerase is at least 80% identical to wild-type M2Y polymerase (SEQ ID NO:2).

16-18. (canceled)

19. The composition of claim 1, wherein the recombinant polymerase comprises one of the following combinations of substitutions and/or insertions:
a) N62D, L253A, E375Y, A484E and K512Y;
b) N62D, L253A, E375Y and K512Y;
c) N62D, H149M, T368F, E375Y, D510M, K512Y and D523M;
d) N62H, E375Y, A484E, E508R and K512Y;
e) D12R, N62H, T368F, E375Y, A484E and K512Y;
f) D12R, T368F, E375Y, A484E, E508R, 511.1K, 511.2S, 512.1G and 512.2S;
g) D12R, T368F, E375Y, I378W, A484E, E508R, 511.1K, 511.2S, 512.1G and 512.2S;
h) N62D, A190E, E375Y, K422A, A484E, E508R and K512Y;
i) N62D, I93Y, T368F, T372Y, E375Y, I378W, K478Y, A484E, E508R, 511.1K, 511.2S, K512Y, 512.1G and 512.2S;
j) N62D, T368F, E375Y, P477Q, A484E and K512Y;
k) N62D, T368F, E375Y, L384M, A484E and K512Y;
l) T368F, E375Y, P477E and K512Y;
m) A176V, T368F, E375Y and K512Y;
n) T368F, E375Y, K422R and K512Y;
o) N62D, E375Y, P477Q, A484E, K512Y;
p) Y148A, E375Y, A484E and K512Y;
q) L253A, E375Y, A484E and K512Y;
r) N62D, T368F, E375Y and K512Y;
s) T368F, E375Y and K512Y;
t) N62D, T368F, E375Y, A484E and K512Y;
u) I93F, T368F, E375Y, A484E and K512Y; or
v) L253A, E375Y and K512Y.

20. (canceled)

21. The composition of claim 1, wherein the recombinant polymerase comprises one or more exogenous features at the C-terminal and/or N-terminal region of the polymerase.

22-29. (canceled)

30. The composition of claim 1, comprising a phosphate-labeled nucleotide analog and a DNA template, wherein the recombinant polymerase incorporates the nucleotide analog into a copy nucleic acid in response to the DNA template.

31-32. (canceled)

33. The composition of claim 1, wherein the composition is present in a DNA sequencing system that comprises a zero-mode waveguide, wherein the recombinant polymerase is immobilized on a surface of the zero-mode waveguide in an active form.

34. A method of sequencing a DNA template, the method comprising:
a) providing a reaction mixture comprising:
the DNA template,
a replication initiating moiety that complexes with or is integral to the template,
the recombinant polymerase of claim 1, wherein the polymerase is capable of replicating at least a portion of the template using the moiety in a template-dependent polymerization reaction, and
one or more nucleotides and/or nucleotide analogs;
b) subjecting the reaction mixture to a polymerization reaction in which the modified recombinant polymerase replicates at least a portion of the template in a template-dependent manner, whereby the one or more nucleotides and/or nucleotide analogs are incorporated into the resulting DNA; and
c) identifying a time sequence of incorporation of the one or more nucleotides and/or nucleotide analogs into the resulting DNA.

35-39. (canceled)

40. A composition comprising a recombinant Φ29-type DNA polymerase, which recombinant polymerase comprises one or more mutation selected from the group consisting of an amino acid substitution at position E239, an amino acid substitution at position Y224, an amino acid substitution at position Y148, E239G, Y224K, Y224Q, Y224R, Y148I , Y148A, Y148K, Y148F, Y148C, Y148D, Y148E, Y148G, Y148H, Y148K, Y148L, Y148M, Y148N, Y148P, Y148Q, Y148R, Y148S, Y148T, Y148V, Y148W, L253A, L253C, L253S, A484E, A484Q, A484N, A484D, A484K, E375T, E375C, E375G, E375N, K512I, K512M, K512C, K512G, K512N, K512Q, K512R, K512V, D510K, D510R, D510C, V250I, V250Q, V250L, V250C, V250F, V250N, V250R, V250T, V250Y, E515Q, E515D, E515H, E515Y, E515C, E515M, E515N, E515P, E515R, E515S, E515T, E515V, E515A, E508R, E508K, F526H, F526M, and F526Y, wherein identification of positions is relative to wild-type Φ29 polymerase (SEQ ID NO:1).

41-43. (canceled)

The application's sequence listing, which the Patent Office published only in electronic form, follows.

SEQUENCE LISTING (200 sequences)

SEQ ID NO: 1 - protein, 574 aa, Bacteriophage phi-29
MKHMPRKMYSCDFETTTKVEDCRVWAYGYMNIEDHSEYKIGNSLDEFMAWVLKVQADLYFHLKFDGAFIINWLERNGFKWSADGLPNTYNTIISRMGQWYMIDICLGYKGKRKIHTVIYDSLKKLPFPVKKIAKDFKLTVLKGDIDYHKERPVGYKITPEEYAYIKNDIQIIAEALLIQFKQGLDRMTAGSDSLKGFKDIITTKKFKKVFPTLSLGLDKEVRYAYRGGFTWLNDRFKEKEIGEGMVFDVNSLYPAQMYSRLLPYGEPIVFEGKYVWDEDYPLHIQHIRCEFELKEGYIPTIQIKRSRFYKGNEYLKSSGGEIADLWLSNVDLELMKEHYDLYNVEYISGLKFKATTGLFKDFIDKWTYIKTTSEGAIKQLAKLMLNSLYGKFASNPDVTGKVPYLKENGALGFRLGEEETKDPVYTPMGVFITAWARYTTITAAQACYDRIIYCDTDSIHLTGTEIPDVIKDIVDPKKLGYWAHESTFKRAKYLRQKTYIQDIYMKEVDGKLVEGSPDDYTDIKFSVKCAGMTDKIKKEVTFENFKVGFSRKMKPKPVQVPGGVVLVDDTFTIK

SEQ ID NO: 2 - protein, 572 aa, Bacteriophage M2Y
MSRKMFSCDFETTTKLDDCRVWAYGYMEIGNLDNYKIGNSLDEFMQWVMEIQADLYFHNLKFDGAFIVNWLEQHGFKWSNEGLPNTYNTIISKMGQWYMIDICFGYKGKRKLHTVIYDSLKKLPFPVKKIAKDFQLPLLKGDIDYHTERPVGHEITPEEYEYIKNDIEIIARALDIQFKQGLDRMTAGSDSLKGFKDILSTKKFNKVFPKLSLPMDKEIRKAYRGGFTWLNDKYKEKEIGEGMVFDVNSLYPSQMYSRPLPYGAPIVFQGKYEKDEQYPLYIQRIRFEFELKEGYIPTIQIKKNPFFKGNEYLKNSGVEPVELYLTNVDLELIQEHYELYNVEYIDGFKFREKTGLFKDFIDKWTYVKTHEEGAKKQLAKLMLNSLYGKFASNPDVTGKVPYLKDDGSLGFRVGDEEYKDPVYTPMGVFITAWARFTTITAAQACYDRIIYCDTDSIHLTGTEVPEIIKDIVDPKKLGYWAHESTFKRAKYLRQKTYIQDIYVKEVDGKLKECSPDEATTTKFSVKCAGMTDTIKKKVTFDNFAVGFSSMGKPKPVQVNGGVVLVDSVFTIK

SEQ ID NO: 3 - protein, 572 aa, Bacteriophage B103
MPRKMFSCDFETTTKLDDCRVWAYGYMEIGNLDNYKIGNSLDEFMQWVMEIQADLYFHNLKFDGAFIVNWLEHHGFKWSNEGLPNTYNTIISKMGQWYMIDICFGYKGKRKLHTVIYDSLKKLPFPVKKIAKDFQLPLLKGDIDYHAERPVGHEITPEEYEYIKNDIEIIARALDIQFKQGLDRMTAGSDSLKGFKDILSTKKFNKVFPKLSLPMDKEIRRAYRGGFTWLNDKYKEKEIGEGMVFDVNSLYPSQMYSRPLPYGAPIVFQGKYEKDEQYPLYIQRIRFEFELKEGYIPTIQIKKNPFFKGNEYLKNSGAEPVELYLTNVDLELIQEHYEMYNVEYIDGFKFREKTGLFKEFIDKWTYVKTHEKGAKKQLAKLMFDSLYGKFASNPDVTGKVPYLKEDGSLGFRVGDEEYKDPVYTPMGVFITAWARFTTITAAQACYDRIIYCDTDSIHLTGTEVPEIIKDIVDPKKLGYWAHESTFKRAKYLRQKTYIQDIYAKEVDGKLIECSPDEATTTKFSVKCAGMTDTIKKKVTFDNFRVGFSSTGKPKPVQVNGGVVLVDSVFTIK

SEQ ID NO: 4 - protein, 578 aa, Bacteriophage GA-1
MARSVYVCDFETTTDPEDCRLWAWGWMDIYNTDKWSYGEDIDSFMEWALNSNSDIYFHNLKFDGSFILPWWLRNGYVHTEEDRTNTPKEFTTTISGMGQWYAVDVCINTRGKNKNHVVFYDSLKKLPFKVEQIAKGFGLPVLKGDIDYKKYRPVGYVMDDNEIEYLKHDLLIVALALRSMFDNDFTSMTVGSDALNTYKEMLGVKQWEKYFPVLSLKVNSEIRKAYKGGFTWVNPKYQGETVYGGMVFDVNSMYPAMMKNKLLPYGEPVMFKGEYKKNVEYPLYIQQVRCFFELKKDKIPCIQIKGNARFGQNEYLSTSGDEYVDLYVTNVDWELIKKHYDIFEEEFIGGFMFKGFIGFFDEYIDRFMEIKNSPDSSAEQSLQAKLMLNSLYGKFATNPDITGKVPYLDENGVLKFRKGELKERDPVYTPMGCFITAYARENILSNAQKLYPRFIYADTDSIHVEGLGEVDAIKDVIDPKKLGYWDHEATFQRARYVRQKTYFIETTWKENDKGKLVVCEPQDATKVKPKIACAGMSDAIKERIRFNEFKIGYSTHGSLKPKNVLGGVVLMDYPFAIK

SEQ ID NO: 5 - protein, 566 aa, Bacteriophage AV-1
MVRQSTIASPARGGVRRSHKKVPSFCADFETTTDEDDCRVWSWGIIQVGKLQNYVDGISLDGFMSHISERASHIYFHNLAFDGTFILDWLLKHGYRWTKENPGVKEFTSLISRMGKYYSITVVFETGFRVEFRDSFKKLPMSVSAIAKAFNLHDQKLEIDYEKPRPIGYIPTEQEKRYQRNDVAIVAQALEVQFAEKMTKLTAGSDSLATYKKMTGKLFIRRFPILSPEIDTEIRKAYRGGFTYADPRYAKKLNGKGSVYDVNSLYPSVMRTALLPYGEPIYSEGAPRTNRPLYIASITFTAKLKPNHIPCIQIKKNLSFNPTQYLEEVKEPTTVVATNIDIELWKKHYDFKIYSWNGTFEFRGSHGFFDTYVDHFMEIKKNSTGGLRQIAKLHLNSLYGKFATNPDITGKHPTLKDNRVSLVMNEPETRDPVYTPMGVFITAYARKKTISAAQDNYETFAYADTDSLHLIGPTTPPDSLWVDPVELGAWKHESSFTKSVYIRAKQYAEEIGGKLDVHIAGMPRNVAATLTLEDMLHGGTWNGKLIPVRVPGGTVLKDTTFTLKID

SEQ ID NO: 6 - protein, 568 aa, Bacteriophage CP-1
MTCYYAGDFETTTNEEETEVWLSCFAKVIDYDKLDTFKVNTSLEDFLKSLYLDLDKTYTETGEDEFIIFFHNLKFDGSFLLSFFLNNDIECTYFINDMGVWYSITLEFPDFTLTFRDSLKILNFSIATMAGLFKMPIAKGTTPLLKHKPEVIKPEWIDYIHVDVAILARGIFAMYYEENFTKYTSASEALTEFKRIFRKSKRKFRDFFPILDEKVDDFCRKHIVGAGRLPTLKHRGRTLNQLIDIYDINSMYPATMLQNALPIGIPKRYKGKPKEIKEDHYYIYHIKADFDLKRGYLPTIQIKKKLDALRIGVRTSDYVTTSKNEVIDLYLTNFDLDLFLKHYDATIMYVETLEFQTESDLFDDYITTYRYKKENAQSPAEKQKAKIMLNSLYGKFGAKIISVKKLAYLDDKGILRFKNDDEEEVQPVYAPVALFVTSIARHFIISNAQENYDNFLYADTDSLHLFHSDSLVLDIDPSEFGKWAHEGRAVKAKYLRSKLYIEELIQEDGTTHLDVKGAGMTPEIKEKITFENFVIGATFEGKRASKQIKGGTLIYETTFKIRETDYLV

SEQ ID NO: 7 - protein, 218 aa, Artificial
  polypeptide tag
MSPILGYWKIKGLVQPTRLLLEYLEEKYEEHLYERDEGDKWRNKKFELGLEFPNLPYYIDGDVKLTQSMAIIRYIADKHNMLGGCPKERAEISMLEGAVLDIRYGVSRIAYSKDFETLKVDFLSKLPEMLKMFEDRLCHKTYLNGDHVTHPDFMLYDALDVVLYMDPMCLDAFPKLVCFKKRIEAIPQIDKYLKSSKYIAWPLQGWQATFGGGDHPPK

SEQ ID NO: 8 - protein, 4 aa, Artificial
  polypeptide linker protease cleavage site
IEGR

SEQ ID NO: 9 - protein, 15 aa, Artificial
  polypeptide tag
GLNDIFEAQKIEWHE

SEQ ID NO: 10 - protein, 15 aa, Artificial
  polypeptide tag
GLNDLFHAQKIEWHE

SEQ ID NO: 11 - protein, 15 aa, Artificial
  polypeptide tag
GLNDFFNAQKIEWHE

SEQ ID NO: 12 - protein, 15 aa, Artificial
  polypeptide tag
GINDLFSAQKIEWHE

SEQ ID NO: 13 - protein, 15 aa, Artificial
  polypeptide tag
GINDIFEAQKIEWHE

SEQ ID NO: 14 - protein, 15 aa, Artificial
  polypeptide tag
GLNLIFEAQKIEWHE

SEQ ID NO: 15 - protein, 15 aa, Artificial
  polypeptide tag
GLNDLFEAQKIEWHE

SEQ ID NO: 16 - protein, 15 aa, Artificial
  polypeptide tag
GLNDFFEAQKIEWHE

SEQ ID NO: 17 - protein, 15 aa, Artificial
  polypeptide tag
GLNDIVEAQKIEWHE

SEQ ID NO: 18 - protein, 15 aa, Artificial
  polypeptide tag
GLNDIFHAQKIEWHE

SEQ ID NO: 19 - protein, 15 aa, Artificial
  polypeptide tag
GLNDIFNAQKIEWHE

SEQ ID NO: 20 - protein, 15 aa, Artificial
  polypeptide tag
GLNDIFSAQKIEWHE

SEQ ID NO: 21 - protein, 15 aa, Artificial
  polypeptide tag
DVEAWLGARVPLVET

SEQ ID NO: 22 - protein, 13 aa, Artificial
  polypeptide tag
GSGAAAAAAAAAH

SEQ ID NO: 23 - protein, 13 aa, Artificial
  polypeptide linker
GGSGGGSGGGSGG

SEQ ID NO: 24 - protein, 10 aa, Artificial
  polypeptide tag
AAAAAAAAAA

SEQ ID NO: 25 - protein, 13 aa, Artificial
  polypeptide tag
GRKKRRQRRRPPQ

SEQ ID NO: 26 - protein, 10 aa, Artificial
  polypeptide tag
KKKKKKKKKK

SEQ ID NO: 27 - protein, 13 aa, Artificial
  polypeptide tag
GSGAAAAAAAAHH

SEQ ID NO: 28 - protein, 13 aa, Artificial
  polypeptide tag
GSGAAAAAAAHHH

SEQ ID NO: 29 - protein, 10 aa, Artificial
  polypeptide tag
EQKLISEEDL

SEQ ID NO: 30 - protein, 64 aa, Artificial
  polypeptide tag
MATVKFKYKGEEKEVDISKIKKVWRVGKMISFTYDEGGGKTGRGAVSEKDAPKELLQMLEKQKK

SEQ ID NO: 31 - protein, 7 aa, Artificial
  polypeptide tag
GHHHHHH

SEQ ID NO: 32 - protein, 8 aa, Artificial
  polypeptide tag
GHHHHHHH

SEQ ID NO: 33 - protein, 9 aa, Artificial
  polypeptide tag
GHHHHHHHH

SEQ ID NO: 34 - protein, 10 aa, Artificial
  polypeptide tag
GHHHHHHHHH

SEQ ID NO: 35 - protein, 11 aa, Artificial
  polypeptide tag
GHHHHHHHHHH

SEQ ID NO: 36 - protein, 12 aa, Artificial
  polypeptide tag
GHHHHHHHHHHH

SEQ ID NO: 37 - protein, 13 aa, Artificial
  polypeptide tag
GHHHHHHHHHHHH

SEQ ID NO: 38 - protein, 14 aa, Artificial
  polypeptide tag
GHHHHHHHHHHHHH

SEQ ID NO: 39 - protein, 15 aa, Artificial
  polypeptide tag
GHHHHHHHHHHHHHH

SEQ ID NO: 40 - protein, 16 aa, Artificial
  polypeptide tag
GHHHHHHHHHHHHHHH

SEQ ID NO: 41 - protein, 17 aa, Artificial
  polypeptide tag
GHHHHHHHHHHHHHHHH

SEQ ID NO: 42 - protein, 18 aa, Artificial
  polypeptide tag
GHHHHHHHHHHHHHHHHH

SEQ ID NO: 43 - protein, 19 aa, Artificial
  polypeptide tag
GHHHHHHHHHHHHHHHHHH

SEQ ID NO: 44 - protein, 20 aa, Artificial
  polypeptide tag
GHHHHHHHHHHHHHHHHHHH

SEQ ID NO: 45 - protein, 21 aa, Artificial
  polypeptide tag
GHHHHHHHHHHHHHHHHHHHH

SEQ ID NO: 46 - protein, 22 aa, Artificial
  polypeptide tag
GHHHHHHHHHHHHHHHHHHHHH

SEQ ID NO: 47 - protein, 23 aa, Artificial
  polypeptide tag
GHHHHHHHHHHHHHHHHHHHHHH

SEQ ID NO: 48 - protein, 24 aa, Artificial
  polypeptide tag
GHHHHHHHHHHHHHHHHHHHHHHH

SEQ ID NO: 49 - protein, 25 aa, Artificial
  polypeptide tag
GHHHHHHHHHHHHHHHHHHHHHHHH

SEQ ID NO: 50 - protein, 17 aa, Artificial
  polypeptide tag
GAAAAAAAAAAAAAAAA

SEQ ID NO: 51 - protein, 616 aa, Artificial
  mutant recombinant phi29-type DNA polymerase
MSVDGLNDIFEAQKIEWHEAMGHHHHHHHHHHSSGHIEGRHMKHMPRKMYSCDFETTTKVEDCRVWAYGYMNIEDHSEYKIGNSLDEFMAWVLKVQADLYFHDLKFDGAFIINWLERNGFKWSADGLPNTYNTIISRMGQWYMIDICLGYKGKRKIHTVIYDSLKKLPFPVKKIAKDFKLTVLKGDIDYHKERPVGYKITPEEYAYIKNDIQIIAEALLIQFKQGLDRMTAGSDSLKGFKDIITTKKFKKVFPTLSLGLDKEVRYAYRGGFTWLNDRFKEKEIGEGMVFDVNSLYPAQMYSRLLPYGEPIVFEGKYVWDEDYPLHIQHIRCEFELKEGYIPTIQIKRSRFYKGNEYLKSSGGEIADLWLSNVDLELMKEHYDLYNVEYISGLKFKATTGLFKDFIDKWTYIKTTSYGAIKQLAKLMLNSLYGKFASNPDVTGKVPYLKENGALGFRLGEEETKDPVYTPMGVFITAWARYTTITAAQACYDRIIYCDTDSIHLTGTEIPDVIKDIVDPKKLGYWAHESTFKRAKYLRQKTYIQDIYMKEVDGYLVEGSPDDYTDIKFSVKCAGMTDKIKKEVTFENFKVGFSRKMKPKPVQVPGGVVLVDDTFTIK

SEQ ID NO: 52 - protein, 616 aa, Artificial
  mutant recombinant phi29-type DNA polymerase
MSVDGLNDIFEAQKIEWHEAMGHHHHHHHHHHSSGHIEGRHMKHMPRKMYSCDFETTTKVEDCRVWAYGYMNIEDHSEYKIGNSLDEFMAWVLKVQADLYFHDLKFDGAFIINWLERNGFKWSADGLPNTYNTIISRMGQWYMIDICLGYKGKRKIHTVIYDSLKKLPFPVKKIAKDFKLTVLKGDIDYHKERPVGYKITPEEYAYIKNDIQIIAEALLIQFKQGLDRMTAGSDSLKGFKDIITTKKFKKVFPTLSLGLDKEVRYAYRGGFTWLNDRFKEKEIGEGMVFDVNSLYPAQMYSRLLPYGEPIVFEGKYVWDEDYPLHIQHIRCEFELKEGYIPTIQIKRSRFYKGNEYLKSSGGEIADLWLSNVDLELMKEHYDLYNVEYISGLKFKATTGLFKDFIDKWFYIKTTSYGAIKQLAKLMLNSLYGKFASNPDVTGKVPYLKENGALGFRLGEEETKDPVYTPMGVFITAWARYTTITAAQACYDRIIYCDTDSIHLTGTEIPDVIKDIVDPKKLGYWAHESTFKRAKYLRQKTYIQDIYMKEVDGYLVEGSPDDYTDIKFSVKCAGMTDKIKKEVTFENFKVGFSRKMKPKPVQVPGGVVLVDDTFTIK

SEQ ID NO: 53 - protein, 616 aa, Artificial; identical to SEQ ID NO: 52
  mutant recombinant phi29-type DNA polymerase

SEQ ID NO: 54 - protein, 616 aa, Artificial
  mutant recombinant phi29-type DNA polymerase
MSVDGLNDIFEAQKIEWHEAMGHHHHHHHHHHSSGHIEGRHMKHMPRKMYSCDFETTTKVEDCRVWAYGYMNIEDHSEYKIGNSLDEFMAWVLKVQADLYFHNLKFDGAFIINWLERNGFKWSADGLPNTYNTIISRMGQWYMIDICLGYKGKRKIHTVIYDSLKKLPFPVKKIAKDFKLTVLKGDIDYHKERPVGYKITPEEYAYIKNDIQIIAEALLIQFKQGLDRMTAGSDSLKGFKDIITTKKFKKVFPTLSLGLDKEVRYAYRGGFTWLNDRFKEKEIGEGMVFDVNSLYPAQMYSRLLPYGEPIVFEGKYVWDEDYPLHIQHIRCEFELKEGYIPTIQIKRSRFYKGNEYLKSSGGEIADLWLSNVDLELMKEHYDLYNVEYISGLKFKATTGLFKDFIDKWFYIKTTSYGAIKQLAKLMLNSLYGKFASNPDVTGKVPYLKENGALGFRLGEEETKDPVYTPMGVFITAWARYTTITAAQACYDRIIYCDTDSIHLTGTEIPDVIKDIVDPKKLGYWAHESTFKRAKYLRQKTYIQDIYMKEVDGYLVEGSPDDYTDIKFSVKCAGMTDKIKKEVTFENFKVGFSRKMKPKPVQVPGGVVLVDDTFTIK

SEQ ID NO: 55 - protein, 616 aa, Artificial
  mutant recombinant phi29-type DNA polymerase
MSVDGLNDIFEAQKIEWHEAMGHHHHHHHHHHSSGHIEGRHMKHMPRKMYSCDFETTTKVEDCRVWAYGYMNIEDHSEYKIGNSLDEFMAWVLKVQADLYFHDLKFDGAFIINWLERNGFKWSADGLPNTYNTIISRMGQWYMIDICLGYKGKRKIHTVIYDSLKKLPFPVKKIAKDFKLTVLKGDIDYHKERPVGYKITPEEYAYIKNDIQIIAEALLIQFKQGLDRMTAGSDSLKGFKDIITTKKFKKVFPTLSLGLDKEVRYAYRGGFTWLNDRFKEKEIGEGMVFDVNSAYPAQMYSRLLPYGEPIVFEGKYVWDEDYPLHIQHIRCEFELKEGYIPTIQIKRSRFYKGNEYLKSSGGEIADLWLSNVDLELMKEHYDLYNVEYISGLKFKATTGLFKDFIDKWTYIKTTSYGAIKQLAKLMLNSLYGKFASNPDVTGKVPYLKENGALGFRLGEEETKDPVYTPMGVFITAWARYTTITAAQACYDRIIYCDTDSIHLTGTEIPDVIKDIVDPKKLGYWEHESTFKRAKYLRQKTYIQDIYMKEVDGYLVEGSPDDYTDIKFSVKCAGMTDKIKKEVTFENFKVGFSRKMKPKPVQVPGGVVLVDDTFTIK

SEQ ID NO: 56 - protein, 616 aa, Artificial
  mutant recombinant phi29-type DNA polymerase
MSVDGLNDIFEAQKIEWHEAMGHHHHHHHHHHSSGHIEGRHMKHMPRKMYSCDFETTTKVEDCRVWAYGYMNIEDHSEYKIGNSLDEFMAWVLKVQADLYFHDLKFDGAFIINWLERNGFKWSADGLPNTYNTIISRMGQWYMIDICLGYKGKRKIHTVIYDSLKKLPFPVKKIAKDFKLTVLKGDIDYHKERPVGYKITPEEYAYIKNDIQIIAEALLIQFKQGLDRMTAGSDSLKGFKDIITTKKFKKVFPTLSLGLDKEVRYAYRGGFTWLNDRFKEKEIGEGMVFDVNSAYPAQMYSRLLPYGEPIVFEGKYVWDEDYPLHIQHIRCEFELKEGYIPTIQIKRSRFYKGNEYLKSSGGEIADLWLSNVDLELMKEHYDLYNVEYISGLKFKATTGLFKDFIDKWTYIKTTSYGAIKQLAKLMLNSLYGKFASNPDVTGKVPYLKENGALGFRLGEEETKDPVYTPMGVFITAWARYTTITAAQACYDRIIYCDTDSIHLTGTEIPDVIKDIVDPKKLGYWAHESTFKRAKYLRQKTYIQDIYMKEVDGYLVEGSPDDYTDIKFSVKCAGMTDKIKKEVTFENFKVGFSRKMKPKPVQVPGGVVLVDDTFTIK

SEQ ID NO: 57 - protein, 627 aa, Artificial
  mutant recombinant phi29-type DNA polymerase
MSVDGLNDIFEAQKIEWHEAMGHHHHHHHHHHSSGHIEGRHMKHMPRKMYSCDFETTTKVEDCRVWAYGYMNIEDHSEYKIGNSLDEFMAWVLKVQADLYFHDLKFDGAFIINWLERNGFKWSADGLPNTYNTIISRMGQWYMIDICLGYKGKRKIHTVIYDSLKKLPFPVKKIAKDFKLTVLKGDIDYHKERPVGYKITPEEYAYIKNDIQIIAEALLIQFKQGLDRMTAGSDSLKGFKDIITTKKFKKVFPTLSLGLDKEVRYAYRGGFTWLNDRFKEKEIGEGMVFDVNSLYPAQMYSRLLPYGEPIVFEGKYVWDEDYPLHIQHIRCEFELKEGYIPTIQIKRSRFYKGNEYLKSSGGEIADLWLSNVDLELMKEHYDLYNVEYISGLKFKATTGLFKDFIDKWFYIKTTSYGAIKQLAKLMLNSLYGKFASNPDVTGKVPYLKENGALGFRLGEEETKDPVYTPMGVFITAWARYTTITAAQACYDRIIYCDTDSIHLTGTEIPDVIKDIVDPKKLGYWEHESTFKRAKYLRQKTYIQDIYMKEVDGYLVEGSPDDYTDIKFSVKCAGMTDKIKKEVTFENFKVGFSRKMKPKPVQVPGGVVLVDDTFTIKGHHHHHHHHHH

SEQ ID NO: 58 - protein, 616 aa, Artificial
  mutant recombinant phi29-type DNA polymerase
MSVDGLNDIFEAQKIEWHEAMGHHHHHHHHHHSSGHIEGRHMKHMPRKMYSCDFETTTKVEDCRVWAYGYMNIEDHSEYKIGNSLDEFMAWVLKVQADLYFHDLKFDGAFIINWLERNGFKWSADGLPNTYNTIISRMGQWYMIDICLGYKGKRKIHTVIYDSLKKLPFPVKKIAKDFKLTVLKGDIDYHKERPVGYKITPEEYAYIKNDIQIIAEALLIQFKQGLDRMTAGSDSLKGFKDIITTKKFKKVFPTLSLGLDKEVRYAYRGGFTWLNDRFKEKEIGEGMVFDVNSLYPAQMYSRLLPYGEPIVFEGKYVWDEDYPLHIQHIRCEFELKEGYIPTIQIKRSRFYKGNEYLKSSGGEIADLWLSNVDLELMKEHYDLYNVEYISGLKFKATTGLFKDFIDKWFYIKTTSYGAIKQLAKLMLNSLYGKFASNPDVTGKVPYLKENGALGFRLGEEETKDPVYTPMGVFITAWARYTTITAAQACYDRIIYCDTDSIHLTGTEIPDVIKDIVDPKKLGYWEHESTFKRAKYLRQKTYIQDIYMKEVDGYLVEGSPDDYTDIKFSVKCAGMTDKIKKEVTFENFKVGFSRKMKPKPVQVPGGVVLVDDTFTIK

SEQ ID NO: 59 - protein, 627 aa, Artificial
  mutant recombinant phi29-type DNA polymerase
MSVDGLNDIFEAQKIEWHEAMGHHHHHHHHHHSSGHIEGRHMKHMPRKMYSCDFETTTKVEDCRVWAYGYMNIEDHSEYKIGNSLDEFMAWVLKVQADLYFHDLKFDGAFIINWLERNGFKWSADGLPNTYNTIISRMGQWYMIDICLGYKGKRKIHTVIYDSLKKLPFPVKKIAKDFKLTVLKGDIDYHKERPVGYKITPEEYAYIKNDIQIIAEALLIQFKQGLDRMTAGSDSLKGFKDIITTKKFKKVFPTLSLGLDKEVRYAYRGGFTWLNDRFKEKEIGEGMVFDVNSAYPAQMYSRLLPYGEPIVFEGKYVWDEDYPLHIQHIRCEFELKEGYIPTIQIKRSRFYKGNEYLKSSGGEIADLWLSNVDLELMKEHYDLYNVEYISGLKFKATTGLFKDFIDKWTYIKTTSYGAIKQLAKLMLNSLYGKFASNPDVTGKVPYLKENGALGFRLGEEETKDPVYTPMGVFITAWARYTTITAAQACYDRIIYCDTDSIHLTGTEIPDVIKDIVDPKKLGYWEHESTFKRAKYLRQKTYIQDIYMKEVDGYLVEGSPDDYTDIKFSVKCAGMTDKIKKEVTFENFKVGFSRKMKPKPVQVPGGVVLVDDTFTIKGHHHHHHHHHH

SEQ ID NO: 60 - protein, 639 aa, Artificial
  mutant recombinant phi29-type DNA polymerase
MSVDGLNDIFEAQKIEWHEAMGHHHHHHHHHHSSGHIEGRHMKHMPRKMYSCDFETTTKVEDCRVWAYGYMNIEDHSEYKIGNSLDEFMAWVLKVQADLYFHDLKFDGAFIINWLERNGFKWSADGLPNTYNTIISRMGQWYMIDICLGYKGKRKIHTVIYDSLKKLPFPVKKIAKDFKLTVLKGDIDYHKERPVGYKITPEEYAYIKNDIQIIAEALLIQFKQGLDRMTAGSDSLKGFKDIITTKKFKKVFPTLSLGLDKEVRYAYRGGFTWLNDRFKEKEIGEGMVFDVNSAYPAQMYSRLLPYGEPIVFEGKYVWDEDYPLHIQHIRCEFELKEGYIPTIQIKRSRFYKGNEYLKSSGGEIADLWLSNVDLELMKEHYDLYNVEYISGLKFKATTGLFKDFIDKWTYIKTTSYGAIKQLAKLMLNSLYGKFASNPDVTGKVPYLKENGALGFRLGEEETKDPVYTPMGVFITAWARYTTITAAQACYDRIIYCDTDSIHLTGTEIPDVIKDIVDPKKLGYWEHESTFKRAKYLRQKTYIQDIYMKEVDGYLVEGSPDDYTDIKFSVKCAGMTDKIKKEVTFENFKVGFSRKMKPKPVQVPGGVVLVDDTFTIKGGSGGGLGGGLGGAAAAAAAAAA

SEQ ID NO: 61 - protein, 616 aa, Artificial
  mutant recombinant phi29-type DNA polymerase
MSVDGLNDIFEAQKIEWHEAMGHHHHHHHHHHSSGHIEGRHMKHMPRKMYSCDFETTTKVEDCRVWAYGYMNIEDHSEYKIGNSLDEFMAWVLKVQADLYFHDLKFDGAFIINWLERNGFKWSADGLPNTYNTIISRMGQWYMIDICLGYKGKRKIHTVIYDSLKKLPFPVKKIAKDFKLTVLKGDIDYMKERPVGYKITPEEYAYIKNDIQIIAEALLIQFKQGLDRMTAGSDSLKGFKDIITTKKFKKVFPTLSLGLDKEVRYAYRGGFTWLNDRFKEKEIGEGMVFDVNSLYPAQMYSRLLPYGEPIVFEGKYVWDEDYPLHIQHIRCEFELKEGYIPTIQIKRSRFYKGNEYLKSSGGEIADLWLSNVDLELMKEHYDLYNVEYISGLKFKATTGLFKDFIDKWFYIKTTSYGAIKQLAKLMLNSLYGKFASNPDVTGKVPYLKENGALGFRLGEEETKDPVYTPMGVFITAWARYTTITAAQACYDRIIYCDTDSIHLTGTEIPDVIKDIVDPKKLGYWAHESTFKRAKYLRQKTYIQDIYMKEVMGYLVEGSPDDYTMIKFSVKCAGMTDKIKKEVTFENFKVGFSRKMKPKPVQVPGGVVLVDDTFTIK

SEQ ID NO: 62 - protein, 627 aa, Artificial
  mutant recombinant phi29-type DNA polymerase
MSVDGLNDIFEAQKIEWHEAMGHHHHHHHHHHSSGHIEGRHMKHMPRKMYSCDFETTTKVEDCRVWAYGYMNIEDHSEYKIGNSLDEFMAWVLKVQADLYFHHLKFDGAFIINWLERNGFKWSADGLPNTYNTIISRMGQWYMIDICLGYKGKRKIHTVIYDSLKKLPFPVKKIAKDFKLTVLKGDIDYHKERPVGYKITPEEYAYIKNDIQIIAEALLIQFKQGLDRMTAGSDSLKGFKDIITTKKFKKVFPTLSLGLDKEVRYAYRGGFTWLNDRFKEKEIGEGMVFDVNSLYPAQMYSRLLPYGEPIVFEGKYVWDEDYPLHIQHIRCEFELKEGYIPTIQIKRSRFYKGNEYLKSSGGEIADLWLSNVDLELMKEHYDLYNVEYISGLKFKATTGLFKDFIDKWTYIKTTSYGAIKQLAKLMLNSLYGKFASNPDVTGKVPYLKENGALGFRLGEEETKDPVYTPMGVFITAWARYTTITAAQACYDRIIYCDTDSIHLTGTEIPDVIKDIVDPKKLGYWEHESTFKRAKYLRQKTYIQDIYMKRVDGYLVEGSPDDYTDIKFSVKCAGMTDKIKKEVTFENFKVGFSRKMKPKPVQVPGGVVLVDDTFTIKGHHHHHHHHHH

SEQ ID NO: 63 - protein, 627 aa, Artificial
  mutant recombinant phi29-type DNA polymerase
MSVDGLNDIFEAQKIEWHEAMGHHHHHHHHHHSSGHIEGRHMKHMPRKMYSCRFETTTKVEDCRVWAYGYMNIEDHSEYKIGNSLDEFMAWVLKVQADLYFHHLKFDGAFIINWLERNGFKWSADGLPNTYNTIISRMGQWYMIDICLGYKGKRKIHTVIYDSLKKLPFPVKKIAKDFKLTVLKGDIDYHKERPVGYKITPEEYAYIKNDIQIIAEALLIQFKQGLDRMTAGSDSLKGFKDIITTKKFKKVFPTLSLGLDKEVRYAYRGGFTWLNDRFKEKEIGEGMVFDVNSLYPAQMYSRLLPYGEPIVFEGKYVWDEDYPLHIQHIRCEFELKEGYIPTIQIKRSRFYKGNEYLKSSGGEIADLWLSNVDLELMKEHYDLYNVEYISGLKFKATTGLFKDFIDKWFYIKTTSYGAIKQLAKLMLNSLYGKFASNPDVTGKVPYLKENGALGFRLGEEETKDPVYTPMGVFITAWARYTTITAAQACYDRIIYCDTDSIHLTGTEIPDVIKDIVDPKKLGYWEHESTFKRAKYLRQKTYIQDIYMKEVDGYLVEGSPDDYTDIKFSVKCAGMTDKIKKEVTFENFKVGFSRKMKPKPVQVPGGVVLVDDTFTIKGHHHHHHHHHH

SEQ ID NO: 64 - protein, 631 aa, Artificial
  mutant recombinant phi29-type DNA polymerase
MSVDGLNDIFEAQKIEWHEAMGHHHHHHHHHHSSGHIEGRHMKHMPRKMYSCRFETTTKVEDCRVWAYGYMNIEDHSEYKIGNSLDEFMAWVLKVQADLYFHNLKFDGAFIINWLERNGFKWSADGLPNTYNTIISRMGQWYMIDICLGYKGKRKIHTVIYDSLKKLPFPVKKIAKDFKLTVLKGDIDYHKERPVGYKITPEEYAYIKNDIQIIAEALLIQFKQGLDRMTAGSDSLKGFKDIITTKKFKKVFPTLSLGLDKEVRYAYRGGFTWLNDRFKEKEIGEGMVFDVNSLYPAQMYSRLLPYGEPIVFEGKYVWDEDYPLHIQHIRCEFELKEGYIPTIQIKRSRFYKGNEYLKSSGGEIADLWLSNVDLELMKEHYDLYNVEYISGLKFKATTGLFKDFIDKWFYIKTTSYGAIKQLAKLMLNSLYGKFASNPDVTGKVPYLKENGALGFRLGEEETKDPVYTPMGVFITAWARYTTITAAQACYDRIIYCDTDSIHLTGTEIPDVIKDIVDPKKLGYWEHESTFKRAKYLRQKTYIQDIYMKRVDGKSKGSLVEGSPDDYTDIKFSVKCAGMTDKIKKEVTFENFKVGFSRKMKPKPVQVPGGVVLVDDTFTIKGHHHHHHHHHH

SEQ ID NO: 65 - protein, 631 aa, Artificial
  mutant recombinant phi29-type DNA polymerase
MSVDGLNDIFEAQKIEWHEAMGHHHHHHHHHHSSGHIEGRHMKHMPRKMYSCRFETTTKVEDCRVWAYGYMNIEDHSEYKIGNSLDEFMAWVLKVQADLYFHNLKFDGAFIINWLERNGFKWSADGLPNTYNTIISRMGQWYMIDICLGYKGKRKIHTVIYDSLKKLPFPVKKIAKDFKLTVLKGDIDYHKERPVGYKITPEEYAYIKNDIQIIAEALLIQFKQGLDRMTAGSDSLKGFKDIITTKKFKKVFPTLSLGLDKEVRYAYRGGFTWLNDRFKEKEIGEGMVFDVNSLYPAQMYSRLLPYGEPIVFEGKYVWDEDYPLHIQHIRCEFELKEGYIPTIQIKRSRFYKGNEYLKSSGGEIADLWLSNVDLELMKEHYDLYNVEYISGLKFKATTGLFKDFIDKWFYIKTTSYGAWKQLAKLMLNSLYGKFASNPDVTGKVPYLKENGALGFRLGEEETKDPVYTPMGVFITAWARYTTITAAQACYDRIIYCDTDSIHLTGTEIPDVIKDIVDPKKLGYWEHESTFKRAKYLRQKTYIQDIYMKRVDGKSKGSLVEGSPDDYTDIKFSVKCAGMTDKIKKEVTFENFKVGFSRKMKPKPVQVPGGVVLVDDTFTIKGHHHHHHHHHH

SEQ ID NO: 66 - protein, 616 aa, Artificial
  mutant recombinant phi29-type DNA polymerase
MSVDGLNDIFEAQKIEWHEAMGHHHHHHHHHHSSGHIEGRHMKHMPRKMYSCDFETTTKVEDCRVWAYGYMNIEDHSEYKIGNSLDEFMAWVLKVQADLYFHNLKFDGAFIINWLERNGFKWSADGLPNTYNTIISRMGQWYMIDICLGYKGKRKIHTVIYDSLKKLPFPVKKIAKDFKLTVLKGDIDAHKERPVGYKITPEEYAYIKNDIQIIAEALLIQFKQGLDRMTAGSDSLKGFKDIITTKKFKKVFPTLSLGLDKEVRYAYRGGFTWLNDRFKEKEIGEGMVFDVNSLYPAQMYSRLLPYGEPIVFEGKYVWDEDYPLHIQHIRCEFELKEGYIPTIQIKRSRFYKGNEYLKSSGGEIADLWLSNVDLELMKEHYDLYNVEYISGLKFKATTGLFKDFIDKWTYIKTTSYGAIKQLAKLMLNSLYGKFASNPDVTGKVPYLKENGALGFRLGEEETKDPVYTPMGVFITAWARYTTITAAQACYDRIIYCDTDSIHLTGTEIPDVIKDIVDPKKLGYWEHESTFKRAKYLRQKTYIQDIYMKEVDGYLVEGSPDDYTDIKFSVKCAGMTDKIKKEVTFENFKVGFSRKMKPKPVQVPGGVVLVDDTFTIK

SEQ ID NO: 67 - protein, 616 aa, Artificial
  mutant recombinant phi29-type DNA polymerase
MSVDGLNDIFEAQKIEWHEAMGHHHHHHHHHHSSGHIEGRHMKHMPRKMYSCDFETTTKVEDCRVWAYGYMNIEDHSEYKIGNSLDEFMAWVLKVQADLYFHDLKFDGAFIINWLERNGFKWSADGLPNTYNTIISRMGQWYMIDICLGYKGKRKIHTVIYDSLKKLPFPVKKIAKDFKLTVLKGDIDYHKERPVGYKITPEEYAYIKNDIQIIAEALLIQFKQGLDRMTEGSDSLKGFKDIITTKKFKKVFPTLSLGLDKEVRYAYRGGFTWLNDRFKEKEIGEGMVFDVNSLYPAQMYSRLLPYGEPIVFEGKYVWDEDYPLHIQHIRCEFELKEGYIPTIQIKRSRFYKGNEYLKSSGGEIADLWLSNVDLELMKEHYDLYNVEYISGLKFKATTGLFKDFIDKWTYIKTTSYGAIKQLAKLMLNSLYGKFASNPDVTGKVPYLKENGALGFRLGEEETADPVYTPMGVFITAWARYTTITAAQACYDRIIYCDTDSIHLTGTEIPDVIKDIVDPKKLGYWEHESTFKRAKYLRQKTYIQDIYMKRVDGYLVEGSPDDYTDIKFSVKCAGMTDKIKKEVTFENFKVGFSRKMKPKPVQVPGGVVLVDDTFTIK

SEQ ID NO: 68 - protein, 631 aa, Artificial
  mutant recombinant phi29-type DNA polymerase
MSVDGLNDIFEAQKIEWHEAMGHHHHHHHHHHSSGHIEGRHMKHMPRKMYSCDFETTTKVEDCRVWAYGYMNIEDHSEYKIGNSLDEFMAWVLKVQADLYFHDLKFDGAFIINWLERNGFKWSADGLPNTYNTYISRMGQWYMIDICLGYKGKRKIHTVIYDSLKKLPFPVKKIAKDFKLTVLKGDIDYHKERPVGYKITPEEYAYIKNDIQIIAEALLIQFKQGLDRMTAGSDSLKGFKDIITTKKFKKVFPTLSLGLDKEVRYAYRGGFTWLNDRFKEKEIGEGMVFDVNSLYPAQMYSRLLPYGEPIVFEGKYVWDEDYPLHIQHIRCEFELKEGYIPTIQIKRSRFYKGNEYLKSSGGEIADLWLSNVDLELMKEHYDLYNVEYISGLKFKATTGLFKDFIDKWFYIKYTSYGAWKQLAKLMLNSLYGKFASNPDVTGKVPYLKENGALGFRLGEEETKDPVYTPMGVFITAWARYTTITAAQACYDRIIYCDTDSIHLTGTEIPDVIKDIVDPYKLGYWEHESTFKRAKYLRQKTYIQDIYMKRVDGKSYGSLVEGSPDDYTDIKFSVKCAGMTDKIKKEVTFENFKVGFSRKMKPKPVQVPGGVVLVDDTFTIKGHHHHHHHHHH

SEQ ID NO: 69 - protein, 616 aa, Artificial
  mutant recombinant phi29-type DNA polymerase
MSVDGLNDIFEAQKIEWHEAMGHHHHHHHHHHSSGHIEGRHMKHMPRKMYSCDFETTTKVEDCRVWAYGYMNIEDHSEYKIGNSLDEFMAWVLKVQADLYFHDLKFDGAFIINWLERNGFKWSADGLPNTYNTIISRMGQWYMIDICLGYKGKRKIHTVIYDSLKKLPFPVKKIAKDFKLTVLKGDIDYHKERPVGYKITPEEYAYIKNDIQIIAEALLIQFKQGLDRMTAGSDSLKGFKDIITTKKFKKVFPTLSLGLDKEVRYAYRGGFTWLNDRFKEKEIGEGMVFDVNSLYPAQMYSRLLPYGEPIVFEGKYVWDEDYPLHIQHIRCEFELKEGYIPTIQIKRSRFYKGNEYLKSSGGEIADLWLSNVDLELMKEHYDLYNVEYISGLKFKATTGLFKDFIDKWFYIKTTSYGAIKQLAKLMLNSLYGKFASNPDVTGKVPYLKENGALGFRLGEEETKDPVYTPMGVFITAWARYTTITAAQACYDRIIYCDTDSIHLTGTEIPDVIKDIVDQKKLGYWEHESTFKRAKYLRQKTYIQDIYMKEVDGYLVEGSPDDYTDIKFSVKCAGMTDKIKKEVTFENFKVGFSRKMKPKPVQVPGGVVLVDDTFTIK

SEQ ID NO: 70 - protein, 616 aa, Artificial
  mutant recombinant phi29-type DNA polymerase
MSVDGLNDIFEAQKIEWHEAMGHHHHHHHHHHSSGHIEGRHMKHMPRKMYSCDFETTTKVEDCRVWAYGYMNIEDHSEYKIGNSLDEFMAWVLKVQADLYFHDLKFDGAFIINWLERNGFKWSADGLPNTYNTIISRMGQWYMIDICLGYKGKRKIHTVIYDSLKKLPFPVKKIAKDFKLTVLKGDIDYHKERPVGYKITPEEYAYIKNDIQIIAEALLIQFKQGLDRMTAGSDSLKGFKDIITTKKFKKVFPTLSLGLDKEVRYAYRGGFTWLNDRFKEKEIGEGMVFDVNSLYPAQMYSRLLPYGEPIVFEGKYVWDEDYPLHIQHIRCEFELKEGYIPTIQIKRSRFYKGNEYLKSSGGEIADLWLSNVDLELMKEHYDLYNVEYISGLKFKATTGLFKDFIDKWFYIKTTSYGAIKQLAKMMLNSLYGKFASNPDVTGKVPYLKENGALGFRLGEEETKDPVYTPMGVFITAWARYTTITAAQACYDRIIYCDTDSIHLTGTEIPDVIKDIVDPKKLGYWEHESTFKRAKYLRQKTYIQDIYMKEVDGYLVEGSPDDYTDIKFSVKCAGMTDKIKKEVTFENFKVGFSRKMKPKPVQVPGGVVLVDDTFTIK

SEQ ID NO: 71 - protein, 616 aa, Artificial
  mutant recombinant phi29-type DNA polymerase
MSVDGLNDIFEAQKIEWHEAMGHHHHHHHHHHSSGHIEGRHMKHMPRKMYSCDFETTTKVEDCRVWAYGYMNIEDHSEYKIGNSLDEFMAWVLKVQADLYFHNLKFDGAFIINWLERNGFKWSADGLPNTYNTIISRMGQWYMIDICLGYKGKRKIHTVIYDSLKKLPFPVKKIAKDFKLTVLKGDIDYHKERPVGYKITPEEYAYIKNDIQIIAEALLIQFKQGLDRMTAGSDSLKGFKDIITTKKFKKVFPTLSLGLDKEVRYAYRGGFTWLNDRFKEKEIGEGMVFDVNSLYPAQMYSRLLPYGEPIVFEGKYVWDEDYPLHIQHIRCEFELKEGYIPTIQIKRSRFYKGNEYLKSSGGEIADLWLSNVDLELMKEHYDLYNVEYISGLKFKATTGLFKDFIDKWFYIKTTSYGAIKQLAKLMLNSLYGKFASNPDVTGKVPYLKENGALGFRLGEEETKDPVYTPMGVFITAWARYTTITAAQACYDRIIYCDTDSIHLTGTEIPDVIKDIVDEKKLGYWAHESTFKRAKYLRQKTYIQDIYMKEVDGYLVEGSPDDYTDIKFSVKCAGMTDKIKKEVTFENFKVGFSRKMKPKPVQVPGGVVLVDDTFTIK

SEQ ID NO: 72 - protein, 616 aa, Artificial
  mutant recombinant phi29-type DNA polymerase
MSVDGLNDIFEAQKIEWHEAMGHHHHHHHHHHSSGHIEGRHMKHMPRKMYSCDFETTTKVEDCRVWAYGYMNIEDHSEYKIGNSLDEFMAWVLKVQADLYFHNLKFDGAFIINWLERNGFKWSADGLPNTYNTIISRMGQWYMIDICLGYKGKRKIHTVIYDSLKKLPFPVKKIAKDFKLTVLKGDIDYHKERPVGYKITPEEYAYIKNDIQIIAEVLLIQFKQGLDRMTAGSDSLKGFKDIITTKKFKKVFPTLSLGLDKEVRYAYRGGFTWLNDRFKEKEIGEGMVFDVNSLYPAQMYSRLLPYGEPIVFEGKYVWDEDYPLHIQHIRCEFELKEGYIPTIQIKRSRFYKGNEYLKSSGGEIADLWLSNVDLELMKEHYDLYNVEYISGLKFKATTGLFKDFIDKWFYIKTTSYGAIKQLAKLMLNSLYGKFASNPDVTGKVPYLKENGALGFRLGEEETKDPVYTPMGVFITAWARYTTITAAQACYDRIIYCDTDSIHLTGTEIPDVIKDIVDPKKLGYWAHESTFKRAKYLRQKTYIQDIYMKEVDGYLVEGSPDDYTDIKFSVKCAGMTDKIKKEVTFENFKVGFSRKMKPKPVQVPGGVVLVDDTFTIK

SEQ ID NO: 73 - protein, 616 aa, Artificial
  mutant recombinant phi29-type DNA polymerase
MSVDGLNDIFEAQKIEWHEAMGHHHHHHHHHHSSGHIEGRHMKHMPRKMYSCDFETTTKVEDCRVWAYGYMNIEDHSEYKIGNSLDEFMAWVLKVQADLYFHNLKFDGAFIINWLERNGFKWSADGLPNTYNTIISRMGQWYMIDICLGYKGKRKIHTVIYDSLKKLPFPVKKIAKDFKLTVLKGDIDYHKERPVGYKITPEEYAYIKNDIQIIAEALLIQFKQGLDRMTAGSDSLKGFKDIITTKKFKKVFPTLSLGLDKEVRYAYRGGFTWLNDRFKEKEIGEGMVFDVNSLYPAQMYSRLLPYGEPIVFEGKYVWDEDYPLHIQHIRCEFELKEGYIPTIQIKRSRFYKGNEYLKSSGGEIADLWLSNVDLELMKEHYDLYNVEYISGLKFKATTGLFKDFIDKWFYIKTTSYGAIKQLAKLMLNSLYGKFASNPDVTGKVPYLKENGALGFRLGEEETRDPVYTPMGVFITAWARYTTITAAQACYDRIIYCDTDSIHLTGTEIPDVIKDIVDPKKLGYWAHESTFKRAKYLRQKTYIQDIYMKEVDGYLVEGSPDDYTDIKFSVKCAGMTDKIKKEVTFENFKVGFSRKMKPKPVQVPGGVVLVDDTFTIK

SEQ ID NO: 74 - protein, 616 aa, Artificial
  mutant recombinant phi29-type DNA polymerase
MSVDGLNDIFEAQKIEWHEAMGHHHHHHHHHHSSGHIEGRHMKHMPRKMYSCDFETTTKVEDCRVWAYGYMNIEDHSEYKIGNSLDEFMAWVLKVQADLYFHDLKFDGAFIINWLERNGFKWSADGLPNTYNTIISRMGQWYMIDICLGYKGKRKIHTVIYDSLKKLPFPVKKIAKDFKLTVLKGDIDYHKERPVGYKITPEEYAYIKNDIQIIAEALLIQFKQGLDRMTAGSDSLKGFKDIITTKKFKKVFPTLSLGLDKEVRYAYRGGFTWLNDRFKEKEIGEGMVFDVNSLYPAQMYSRLLPYGEPIVFEGKYVWDEDYPLHIQHIRCEFELKEGYIPTIQIKRSRFYKGNEYLKSSGGEIADLWLSNVDLELMKEHYDLYNVEYISGLKFKATTGLFKDFIDKWTYIKTTSYGAIKQLAKLMLNSLYGKFASNPDVTGKVPYLKENGALGFRLGEEETKDPVYTPMGVFITAWARYTTITAAQACYDRIIYCDTDSIHLTGTEIPDVIKDIVDQKKLGYWEHESTFKRAKYLRQKTYIQDIYMKEVDGYLVEGSPDDYTDIKFSVKCAGMTDKIKKEVTFENFKVGFSRKMKPKPVQVPGGVVLVDDTFTIK

SEQ ID NO: 75 - protein, 616 aa, Artificial
  mutant recombinant phi29-type DNA polymerase
MSVDGLNDIFEAQKIEWHEAMGHHHHHHHHHHSSGHIEGRHMKHMPRKMYSCDFETTTKVEDCRVWAYGYMNIEDHSEYKIGNSLDEFMAWVLKVQADLYFHNLKFDGAFIINWLERNGFKWSADGLPNTYNTFISRMGQWYMIDICLGYKGKRKIHTVIYDSLKKLPFPVKKIAKDFKLTVLKGDIDYHKERPVGYKITPEEYAYIKNDIQIIAEALLIQFKQGLDRMTAGSDSLKGFKDIITTKKFKKVFPTLSLGLDKEVRYAYRGGFTWLNDRFKEKEIGEGMVFDVNSLYPAQMYSRLLPYGEPIVFEGKYVWDEDYPLHIQHIRCEFELKEGYIPTIQIKRSRFYKGNEYLKSSGGEIADLWLSNVDLELMKEHYDLYNVEYISGLKFKATTGLFKDFIDKWFYIKTTSYGAIKQLAKLMLNSLYGKFASNPDVTGKVPYLKENGALGFRLGEEETKDPVYTPMGVFITAWARYTTITAAQACYDRIIYCDTDSIHLTGTEIPDVIKDIVDPKKLGYWEHESTFKRAKYLRQKTYIQDIYMKEVDGYLVEGSPDDYTDIKFSVKCAGMTDKIKKEVTFENFKVGFSRKMKPKPVQVPGGVVLVDDTFTIK

SEQ ID NO: 76 - protein, 616 aa, Artificial
  mutant recombinant phi29-type DNA polymerase
MSVDGLNDIFEAQKIEWHEAMGHHHHHHHHHHSSGHIEGRHMKHMPRKMYSCDFETTTKVEDCRVWAYGYMNIEDHSEYKIGNSLDEFMAWVLKVQADLYFHNLKFDGAFIINWLERNGFKWSADGLPNTYNTIISRMGQWYMIDICLGYKGKRKIHTVIYDSLKKLPFPVKKIAKDFKLTVLKGDIDYHKERPVGYKITPEEYAYIKNDIQIIAEALLIQFKQGLDRMTAGSDSLKGFKDIITTKKFKKVFPTLSLGLDKEVRYAYRGGFTWLNDRFKEKEIGEGMVFDVNSAYPAQMYSRLLPYGEPIVFEGKYVWDEDYPLHIQHIRCEFELKEGYIPTIQIKRSRFYKGNEYLKSSGGEIADLWLSNVDLELMKEHYDLYNVEYISGLKFKATTGLFKDFIDKWTYIKTTSYGAIKQLAKLMLNSLYGKFASNPDVTGKVPYLKENGALGFRLGEEETKDPVYTPMGVFITAWARYTTITAAQACYDRIIYCDTDSIHLTGTEIPDVIKDIVDPKKLGYWEHESTFKRAKYLRQKTYIQDIYMKEVDGYLVEGSPDDYTDIKFSVKCAGMTDKIKKEVTFENFKVGFSRKMKPKPVQVPGGVVLVDDTFTIK

SEQ ID NO: 77 - protein, 616 aa, Artificial
  mutant recombinant phi29-type DNA polymerase
MSVDGLNDIFEAQKIEWHEAMGHHHHHHHHHHSSGHIEGRHMKHMPRKMYSCDFETTTKVEDCRVWAYGYMNIEDHSEYKIGNSLDEFMAWVLKVQADLYFHDLKFDGAFIINWLERNGFKWSADGLPNTYNTIISRMGQWYMIDICLGYKGKRKIHTVIYDSLKKLPFPVKKIAKDFKLTVLKGDIDYHKERPVGYKITPEEYAYIKNDIQIIAEALLIQFKQGLDRMTAGSDSLKGFKDIITTKKFKKVFPTLSLGLDKEVRYAYRGGFTWLNDRFKEKEIGEGMVFDVNSAYPAQMYSRLLPYGEPIVFEGKYVWDEDYPLHIQHIRCEFELKEGYIPTIQIKRSRFYKGNEYLKSSGGEIADLWLSNVDLELMKEHYDLYNVEYISGLKFKATTGLFKDFIDKWTYIKTTSYGAIKQLAKLMLNSLYGKFASNPDVTGKVPYLKENGALGFRLGEEMTKDPVYTPMGVFITAWARYTTITAAQACYDRIIYCDTDSIHLTGTEIPDVIKDIVDPKKLGYWEHESTFKRAKYLRQKTYIQDIYMKEVDGYLVEGSPDDYTDIKFSVKCAGMTDKIKKEVTFENFKVGFSRKMKPKPVQVPGGVVLVDDTFTIK

SEQ ID NO: 78 - protein, 616 aa, Artificial
  mutant recombinant phi29-type DNA polymerase
MSVDGLNDIFEAQKIEWHEAMGHHHHHHHHHHSSGHIEGRHMKHMPRKMYSCDFETTTKVEDCRVWAYGYMNIEDHSEYKIGNSLDEFMAWVLKVQADLYFHDLKFDGAFIINWLERNGFKWSADGLPNTYNTIISRMGQWYMIDICLGYKGKRKIHTVIYDSLKKLPFPVKKIAKDFKLTVLKGDIDYHKERPVGYKITPEEYAYIKNDIQIIAEALLIQFKQGLDRMTAGSDSLKGFKDIITTKKFKKVFPTLSLGLDKEVRYAYRGGFTWLNDRFKEKEIGEGMVFDVNSAYPAQMYSRLLPYGEPIVFEGKYVWDEDYPLHIQHIRCEFELKEGYIPTIQIKRSRFYKGNEYLKSSGGEIADLWLSNVDLELMKEHYDLYNVEYISGLKFKATTGLFKDFIDKWTYIKTTSYGAIKQLAKLMLNSLYGKFASNPDVTGKVPYLKENGALGFRLGEEETADPVYTPMGVFITAWARYTTITAAQACYDRIIYCDTDSIHLTGTEIPDVIKDIVDPKKLGYWEHESTFKRAKYLRQKTYIQDIYMKEVDGYLVEGSPDDYTDIKFSVKCAGMTDKIKKEVTFENFKVGFSRKMKPKPVQVPGGVVLVDDTFTIK

SEQ ID NO: 79 - protein, 616 aa, Artificial
  mutant recombinant phi29-type DNA polymerase
MSVDGLNDIFEAQKIEWHEAMGHHHHHHHHHHSSGHIEGRHMKHMPRKMYSCDFETTTKVEDCRVWAYGYMNIEDHSEYKIGNSLDEFMAWVLKVQADLYFHDLKFDGAFIINWLERNGFKWSADGLPNTYNTIISRMGQWYMIDICLGYKGKRKIHTVIYDSLKKLPFPVKKIAKDFKLTVLKGDIDYHKERPVGYKITPEEYAYIKNDIQIIAEALLIQFKQGLDRMTAGSDSLKGFKDIITTKKFKKVFPTLSLGLDKEVRYAYRGGFTWLNDRFKEKEIGEGMVFDVNSAYPAQMYSRLLPYGEPIVFEGKYVWDEDYPLHIQHIRCEFELKEGYIPTIQIKRSRFYKGNEYLKSSGGEIADLWLSNVDLELMKEHYDLYNVEYISGLKFKATTGLFKDFIDKWTYIKTTSYGAIKQLAKLMLNSLYGKFASNPDVTGKVPYLKENGALGFRLGEEETKDPVYTPMGVFITAWARYTTITAAQACYDRIIYCDTDSIHLTGTEIPDVIKDIVDPKKLGYWEHESTFKRAKYLRQKTYIQDIYMKKVDGYLVEGSPDDYTDIKFSVKCAGMTDKIKKEVTFENFKVGFSRKMKPKPVQVPGGVVLVDDTFTIK

SEQ ID NO: 80 - protein, 616 aa, Artificial
  mutant recombinant phi29-type DNA polymerase
MSVDGLNDIFEAQKIEWHEAMGHHHHHHHHHHSSGHIEGRHMKHMPRKMYSCDFETTTKVEDCRVWAYGYMNIEDHSEYKIGNSLDEFMAWVLKVQADLYFHDLKFDGAFIINWLERNGFKWSADGLPNTYNTIISRMGQWYMIDICLGYKGKRKIHTVIYDSLKKLPFPVKKIAKDFKLTVLKGDIDYHKERPVGYKITPEEYAYIKNDIQIIAEALLIQFKQGLDRMTAGSDSLKGFKDIITTKKFKKVFPTLDLGLDKEVRYAYRGGFTWLNDRFKEKEIGEGMVFDVNSAYPAQMYSRLLPYGEPIVFEGKYVWDEDYPLHIQHIRCEFELKEGYIPTIQIKRSRFYKGNEYLKSSGGEIADLWLSNVDLELMKEHYDLYNVEYISGLKFKATTGLFKDFIDKWTYIKTTSYGAIKQLAKLMLNSLYGKFASNPDVTGKVPYLKENGALGFRLGEEETKDPVYTPMGVFITAWARYTTITAAQACYDRIIYCDTDSIHLTGTEIPDVIKDIVDPKKLGYWEHESTFKRAKYLRQKTYIQDIYMKEVDGYLVEGSPDDYTDIKFSVKCAGMTDKIKKEVTFENFKVGFSRKMKPKPVQVPGGVVLVDDTFTIK

SEQ ID NO: 81 - protein, 616 aa, Artificial
  mutant recombinant phi29-type DNA polymerase
MSVDGLNDIFEAQKIEWHEAMGHHHHHHHHHHSSGHIEGRHMKHMPRKMYSCDFETTTKVEDCRVWAYGYMNIEDHSEYKIGNSLDEFMAWVLKVQADLYFHDLKFDGAFIINWLERNGFKWSADGLPNTYNTIISRMGQWYMIDICLGYKGKRKIHTVIYDSLKKLPFPVKKIAKDFKLTVLKGDIDYHKERPVGYKITPEEYAYIKNDIQIIAEALLIQFKQGLDRMTAGSDSLKGFKDIITTKKFKKVFPTLSLGLDKEVRYAYRGGFTWLNDRFKEKEIGEGMVFDVNSTYPAQMYSRLLPYGEPIVFEGKYVWDEDYPLHIQHIRCEFELKEGYIPTIQIKRSRFYKGNEYLKSSGGEIADLWLSNVDLELMKEHYDLYNVEYISGLKFKATTGLFKDFIDKWTYIKTTSYGAIKQLAKLMLNSLYGKFASNPDVTGKVPYLKENGALGFRLGEEETKDPVYTPMGVFITAWARYTTITAAQACYDRIIYCDTDSIHLTGTEIPDVIKDIVDPKKLGYWEHESTFKRAKYLRQKTYIQDIYMKEVDGYLVEGSPDDYTDIKFSVKCAGMTDKIKKEVTFENFKVGFSRKMKPKPVQVPGGVVLVDDTFTIK

SEQ ID NO: 82 - protein, 616 aa, Artificial
  mutant recombinant phi29-type DNA polymerase
MSVDGLNDIFEAQKIEWHEAMGHHHHHHHHHHSSGHIEGRHMKHMPRKMYSCDFETTTKVEDCRVWAYGYMNIEDHSEYKIGNSLDEFMAWVLKVQADLYFHDLKFDGAFIINWLERNGFKWSADGLPNTYNTIISRMGQWYMIDICLGYKGKRKIHTVIYDSLKKLPFPVKKIAKDFKLTVLKGDIDYHKERPVGYKITPEEYAYIKNDIQIIAEALLIQFKQGLDRMTAGSDSLKGFKDIITTKKFKKVFPTLSLGLDKEVRYAYRGGFTWLNDRFKEKEIGEGMVFDVNSAYPAQMYSRLLPYGEPIVFEGKYVWDEDYPLHIQHIRCEFELKEGYIPTIQIKRSRFYKGNEYLKSSGGEIADLWLSNVDLELMKEHYDLYNVEYISGLKFKATTGLFKDFIDKWTHIKTTSYGAIKQLAKLMLNSLYGKFASNPDVTGKVPYLKENGALGFRLGEEETKDPVYTPMGVFITAWARYTTITAAQACYDRIIYCDTDSIHLTGTEIPDVIKDIVDPKKLGYWEHESTFKRAKYLRQKTYIQDIYMKEVDGYLVEGSPDDYTDIKFSVKCAGMTDKIKKEVTFENFKVGFSRKMKPKPVQVPGGVVLVDDTFTIK

SEQ ID NO: 83 - protein, 616 aa, Artificial
  mutant recombinant phi29-type DNA polymerase
MSVDGLNDIFEAQKIEWHEAMGHHHHHHHHHHSSGHIEGRHMKHMPRKMYSCDFETTTKVEDCRVWAYGYMNIEDHSEYKIGNSLDEFMAWVLKVQADLYFHDLKFDGAFIINWLERNGFKWSADGLPNTYNTIISRMGQWYMIDICLGYKGKRKIHTVIYDSLKKLPFPVKKIAKDFKLTVLKGDIDYHKERPVGYKITPEEYAYIKNDIQIIAEALLIQFKQGLDRMTAGSDSLKGFKDIITTKKFKKVFPTLSLGLDKEVRYAYRGGFTWLNDRFKEKEIGEGMVFDVNSAYPAQMYSRLLPYGEPIVFEGKYVWDEDYPLHIQHIRCEFELKEGYIPTIQIKRSRFYKGNEYLKSSGGEIADLWLSNVDLELMKEHYDLYNVEYISGLKFKATTGLFKDFIDKWTGIKTTSYGAIKQLAKLMLNSLYGKFASNPDVTGKVPYLKENGALGFRLGEEETKDPVYTPMGVFITAWARYTTITAAQACYDRIIYCDTDSIHLTGTEIPDVIKDIVDPKKLGYWEHESTFKRAKYLRQKTYIQDIYMKEVDGYLVEGSPDDYTDIKFSVKCAGMTDKIKKEVTFENFKVGFSRKMKPKPVQVPGGVVLVDDTFTIK

SEQ ID NO: 84 - protein, 616 aa, Artificial
  mutant recombinant phi29-type DNA polymerase
MSVDGLNDIFEAQKIEWHEAMGHHHHHHHHHHSSGHIEGRHMKHMPRKMYSCDFETTTKVEDCRVWAYGYMNIEDHSEYKIGNSLDEFMAWVLKVQADLYFHDLKFDGAFIINWLERNGFKWSADGLPNTYNTIISRMGQWYMIDICLGYKGKRKIHTVIYDSLKKLPFPVKKIAKDFKLTVLKGDIDYHKERPVGYKITPEEYAYIKNDIQIIAEALLIQFKQGLDRMTAGSDSLKGFKDIITTKKFKKVFPTLSLGLDKEVRYAYRGGFTWLNDRFKEKEIGEGMVFDVNSAYPAQMYSRLLPYGEPIVFEGKYVWDEDYPLHIQHIRCEFELKEGYIPTIQIKRSRFYKGNEYLKSSGGEIADLWLSNVDLELMKEHYDLYNVEYISGLKFKATTGLFKDFIDKWTLIKTTSYGAIKQLAKLMLNSLYGKFASNPDVTGKVPYLKENGALGFRLGEEETKDPVYTPMGVFITAWARYTTITAAQACYDRIIYCDTDSIHLTGTEIPDVIKDIVDPKKLGYWEHESTFKRAKYLRQKTYIQDIYMKEVDGYLVEGSPDDYTDIKFSVKCAGMTDKIKKEVTFENFKVGFSRKMKPKPVQVPGGVVLVDDTFTIK

SEQ ID NO: 85 - protein, 616 aa, Artificial
  mutant recombinant phi29-type DNA polymerase
MSVDGLNDIFEAQKIEWHEAMGHHHHHHHHHHSSGHIEGRHMKHMPRKMYSCDFETTTKVEDCRVWAYGYMNIEDHSEYKIGNSLDEFMAWVLKVQADLYFHDLKFDGAFIINWLERNGFKWSADGLPNTYNTIISRMGQWYMIDICLGYKGKRKIHTVIYDSLKKLPFPVKKIAKDFKLTVLKGDIDYHKERPVGYKITPEEYAYIKNDIQIIAEALLIQFKQGLDRMTAGSDSLKGFKDIITTKKFKKVFPTLSLGLDKEVRYAYRGGFTWLNDRFKEKEIGEGMVFDVNSAYPAQMYSRLLPYGEPIVFEGKYVWDEDYPLHIQHIRCEFELKEGYIPTIQIKRSRFYKGNEYLKSSGGEIADLWLSNVDLELMKEHYDLYNVEYISGLKFKATTGLFKDFIDKWTYIKTTSFGAIKQLAKLMLNSLYGKFASNPDVTGKVPYLKENGALGFRLGEEETKDPVYTPMGVFITAWARYTTITAAQACYDRIIYCDTDSIHLTGTEIPDVIKDIVDPKKLGYWEHESTFKRAKYLRQKTYIQDIYMKEVDGYLVEGSPDDYTDIKFSVKCAGMTDKIKKEVTFENFKVGFSRKMKPKPVQVPGGVVLVDDTFTIK

SEQ ID NO: 86 - protein, 616 aa, Artificial
  mutant recombinant phi29-type DNA polymerase
MSVDGLNDIFEAQKIEWHEAMGHHHHHHHHHHSSGHIEGRHMKHMPRKMYSCDFETTTKVEDCRVWAYGYMNIEDHSEYKIGNSLDEFMAWVLKVQADLYFHNLKFRGAFIINWLERNGFKWSADGLPNTYNTIISRMGQWYMIDICLGYKGKRKIHTVIYDSLKKLPFPVKKIAKDFKLTVLKGDIDYHKERPVGYKITPEEYAYIKNDIQIIAEALLIQFKQGLDRMTAGSDSLKGFKDIITTKKFKKVFPTLSLGLDKEVRYAYRGGFTWLNDRFKEKEIGEGMVFDVNSAYPAQMYSRLLPYGEPIVFEGKYVWDEDYPLHIQHIRCEFELKEGYIPTIQIKRSRFYKGNEYLKSSGGEIADLWLSNVDLELMKEHYDLYNVEYISGLKFKATTGLFKDFIDKWTYIKTTSYGAIKQLAKLMLNSLYGKFASNPDVTGKVPYLKENGALGFRLGEEETKDPVYTPMGVFITAWARYTTITAAQACYDRIIYCDTDSIHLTGTEIPDVIKDIVDPKKLGYWEHESTFKRAKYLRQKTYIQDIYMKEVDGYLVEGSPDDYTDIKFSVKCAGMTDKIKKEVTFENFKVGFSRKMKPKPVQVPGGVVLVDDTFTIK

SEQ ID NO: 87 - protein, 616 aa, Artificial
  mutant recombinant phi29-type DNA polymerase
MSVDGLNDIFEAQKIEWHEAMGHHHHHHHHHHSSGHIEGRHMKHMPRKMYSCDFETTTKVEDCRVWAYGYMNIEDHSEYKIGNSLDEFMAWVLKVQADLYFHDLKFDGAFIINWLERNGFKWSADGLPNTYNTIISRMGQWYMIDICLGYKGKRKIHTVIYDSLKKLPFPVKKIAKDFKLTVLKGDIDYHKERPVGYKITPEEYAYIKNDIQIIAEALLIQFKQGLDRMTAGSDSLKGFKDIITTKKFKKVFPTLSLGLDKEVRYAYRGGFTWLNDRFKEKEIGEGMVFDVNSAYPAQMYSRLLPYGEPIVFEGKYVWDEDYPLHIQHIRCEFELKEGYIPTIQIKRSRFYKGNEYLKSSGGEIADLWLSNVDLELMKEHYDLYNVEYISGLKFKATTGLFKDFIDKWTYIKTTSYGAIKQLAKLMLNSLYGKFASNPDVTGKVPYLKENGALGFRLGEEETKDPVYTPMGVFITAWARYTTITAAQACYDRIIYCDTDSIHLTGTEIPDVIKDIVDPKKLGYWEHESTFKRAKYLRQKTYIQDRYMKEVDGYLVEGSPDDYTDIKFSVKCAGMTDKIKKEVTFENFKVGFSRKMKPKPVQVPGGVVLVDDTFTIK

SEQ ID NO: 88 - protein, 616 aa, Artificial
  mutant recombinant phi29-type DNA polymerase
MSVDGLNDIFEAQKIEWHEAMGHHHHHHHHHHSSGHIEGRHMKHMPRKMYSCDFETTTKVEDCRVWAYGYMNIEDHSEYKIGNSLDEFMAWVLKVQADLYFHDLKFDGAFIINWLERNGFKWSADGLPNTYNTIISRMGQWYMIDICLGYKGKRKIHTVIYDSLKKLPFPVKKIAKDFKLTVLKGDIDYHKERPVGYKITPEEYAYIKNDIQIIAEALLIQFKQGLDRMTAGSDSLKGFKDIITTKKFKKVFPTLSLGLDKEVRYAYRGGFTWLNDRFKEKEIGEGMVFDVNSAYPAQMYSRLLPYGEPIVFEGKYVWDEDYPLHIQHIRCEFELKEGYIPTIQIKRSRFYKGNEYLKSSGGEIADLWLSNVDLELMKEHYDLYNVEYISGLKFKATTGLFKDFIDKWTYIKTTSYGAIKQLAKLMLNSLYGKFASNPDVTGKVPYLKENGALGFRLGEEETKDPVYTPMGVFITAWARYTTITAAQACYDRIIYCDTDSIHLTGTEIPDVIKDIVDPKKLGYWEHESTFKRAKYLRQKTYIQDIYMKEVKGYLVEGSPDDYTDIKFSVKCAGMTDKIKKEVTFENFKVGFSRKMKPKPVQVPGGVVLVDDTFTIK

SEQ ID NO: 89 - protein, 627 aa, Artificial
  mutant recombinant phi29-type DNA polymerase
MSVDGLNDIFEAQKIEWHEAMGHHHHHHHHHHSSGHIEGRHMKHMPRKMYSCDFETTTKVEDCRVWAYGYMNIEDHSEYKIGNSLDEFMAWVLKVQADLYFHNLKFDGAFIINWLERNGFKWSADGLPNTYNTIISRMGQWYMIDICLGYKGKRKIHTVIYDSLKKLPFPVKKIAKDFKLTVLKGDIDYHKERPVGYKITPEEYAYIKNDIQIIAEALLIQFKQGLDRMTAGSDSLKGFKDIITTKKFKKVFPTLSLGLDKEVRYAYRGGFTWLNDRFKEKEIGEGMVFDVNSAYPAQMYSRLLPYGEPIVFEGKYVWDEDYPLHIQHIRCEFELKEGYIPTIQIKRSRFYKGNEYLKSSGGEIADLWLSNVDLELMKEHYDLYNVEYISGLKFKATTGLFKDFIDKWTYIKTTSYGAIKQLAKLMLNSLYGKFASNPDVTGKVPYLKENGALGFRLGEEETKDPVYTPMGVFITAWARYTTITAAQACYDRIIYCDTDSIHLTGTEIPDVIKDIVDPKKLGYWEHESTFKRAKYLRQKTYIQDIYMKEVDGYLVEGSPDDYTDIKFSVKCAGMTDKIKKEVTFENFKVGFSRKMKPKPVQVPGGVVLVDDTFTIKGHHHHHHHHHH

SEQ ID NO: 90 - protein, 627 aa, Artificial
  mutant recombinant phi29-type DNA polymerase
MSVDGLNDFFEAQKIEWHEAMGHHHHHHHHHHSSGHIEGRHMKHMPRKMYSCDFETTTKVEDCRVWAYGYMNIEDHSEYKIGNSLDEFMAWVLKVQADLYFHNLKFDGAFIINWLERNGFKWSADGLPNTYNTIISRMGQWYMIDICLGYKGKRKIHTVIYDSLKKLPFPVKKIAKDFKLTVLKGDIDYHKERPVGYKITPEEYAYIKNDIQIIAEALLIQFKQGLDRMTAGSDSLKGFKDIITTKKFKKVFPTLSLGLDKEVRYAYRGGFTWLNDRFKEKEIGEGMVFDVNSAYPAQMYSRLLPYGEPIVFEGKYVWDEDYPLHIQHIRCEFELKEGYIPTIQIKRSRFYKGNEYLKSSGGEIADLWLSNVDLELMKEHYDLYNVEYISGLKFKATTGLFKDFIDKWTYIKTTSYGAIKQLAKLMLNSLYGKFASNPDVTGKVPYLKENGALGFRLGEEETKDPVYTPMGVFITAWARYTTITAAQACYDRIIYCDTDSIHLTGTEIPDVIKDIVDPKKLGYWEHESTFKRAKYLRQKTYIQDIYMKEVDGYLVEGSPDDYTDIKFSVKCAGMTDKIKKEVTFENFKVGFSRKMKPKPVQVPGGVVLVDDTFTIKGHHHHHHHHHH

SEQ ID NO: 91 - protein, 627 aa, Artificial
  mutant recombinant phi29-type DNA polymerase
MSVDGLNDIFEAQKIEWHEAMGHHHHHHHHHHSSGHIEGRHMKHMPRKMYSCDFETTTKVEDCRVWAYGYMNIEDHSEYKIGNSLDEFMAWVLKVQADLYFHNLKFDGAFIINWLERNGFKWSADGLPNTYNTIISRMGQWYMIDICLGYKGKRKIHTVIYDSLKKLPFPVKKIAKDFKLTVLKGDIDYHKERPVGYKITPEEYAYIKNDIQIIAEALLIQFKQGLDRMTAGSDSLKGFKDIITTKKFKKVFPTLSLGLDKEVRYAYRGGFTWLNDRFKEKEIGEGMVFDVNSAYPAQMYSRLLPYGEPIVFEGKYVWDEDYPLHIQHIRCEFELKEGYIPTIQIKRSRFYKGNEYLKSSGGEIADLWLSNVDLELMKEHYDLYNVEYISGLKFKATTGLFKDFIDKWTYIKTTSYGAIKQLAKLMLNSLYGKFASNPDVTGKVPYLKENGALGFRLGEEETKDPVYTPMGVFITAWARYTTITAAQACYDRIIYCDTDSIHLTGTEIPDVIKDIVDPKKLGYWEHESTFKRAKYLRQKTYIQDIYMKRVDGYLVEGSPDDYTDIKFSVKCAGMTDKIKKEVTFENFKVGFSRKMKPKPVQVPGGVVLVDDTFTIKGHHHHHHHHHH

SEQ ID NO: 92 - protein, 575 aa, Artificial
  mutant recombinant phi29-type DNA polymerase
MKHMPRKMYSCDFETTTKVEDCRVWAYGYMNIEDHSEYKIGNSLDEFMAWVLKVQADLYFHDLKFDGAFIINWLERNGFKWSADGLPNTYNTIISRMGQWYMIDICLGYKGKRKIHTVIYDSLKKLPFPVKKIAKDFKLTVLKGDIDYHKERPVGYKITPEEYAYIKNDIQIIAEALLIQFKQGLDRMTAGSDSLKGFKDIITTKKFKKVFPTLSLGLDKEVRYAYRGGFTWLNDRFKEKEIGEGMVFDVNSLYPAQMYSRLLPYGEPIVFEGKYVWDEDYPLHIQHIRCEFELKEGYIPTIQIKRSRFYKGNEYLKSSGGEIADLWLSNVDLELMKEHYDLYNVEYISGLKFKATTGLFKDFIDKWTYIKTTSYGAIKQLAKLMLNSLYGKFASNPDVTGKVPYLKENGALGFRLGEEETKDPVYTPMGVFITAWARYTTITAAQACYDRIIYCDTDSIHLTGTEIPDVIKDIVDPKKLGYWAHESTFKRAKYLRQKTYIQDIYMKEVDGYLVEGSPDDYTDIKFSVKCAGMTDKIKKEVTFENFKVGFSRKMKPKPVQVPGGVVLVDDTFTIK

SEQ ID NO: 93 - protein, 575 aa, Artificial
  mutant recombinant phi29-type DNA polymerase
MKHMPRKMYSCDFETTTKVEDCRVWAYGYMNIEDHSEYKIGNSLDEFMAWVLKVQADLYFHDLKFDGAFIINWLERNGFKWSADGLPNTYNTIISRMGQWYMIDICLGYKGKRKIHTVIYDSLKKLPFPVKKIAKDFKLTVLKGDIDYHKERPVGYKITPEEYAYIKNDIQIIAEALLIQFKQGLDRMTAGSDSLKGFKDIITTKKFKKVFPTLSLGLDKEVRYAYRGGFTWLNDRFKEKEIGEGMVFDVNSLYPAQMYSRLLPYGEPIVFEGKYVWDEDYPLHIQHIRCEFELKEGYIPTIQIKRSRFYKGNEYLKSSGGEIADLWLSNVDLELMKEHYDLYNVEYISGLKFKATTGLFKDFIDKWFYIKTTSYGAIKQLAKLMLNSLYGKFASNPDVTGKVPYLKENGALGFRLGEEETKDPVYTPMGVFITAWARYTTITAAQACYDRIIYCDTDSIHLTGTEIPDVIKDIVDPKKLGYWAHESTFKRAKYLRQKTYIQDIYMKEVDGYLVEGSPDDYTDIKFSVKCAGMTDKIKKEVTFENFKVGFSRKMKPKPVQVPGGVVLVDDTFTIK

SEQ ID NO: 94 - protein, 575 aa, Artificial; identical to SEQ ID NO: 93
  mutant recombinant phi29-type DNA polymerase

SEQ ID NO: 95 - protein, 575 aa, Artificial
  mutant recombinant phi29-type DNA polymerase
MKHMPRKMYSCDFETTTKVEDCRVWAYGYMNIEDHSEYKIGNSLDEFMAWVLKVQADLYFHNLKFDGAFIINWLERNGFKWSADGLPNTYNTIISRMGQWYMIDICLGYKGKRKIHTVIYDSLKKLPFPVKKIAKDFKLTVLKGDIDYHKERPVGYKITPEEYAYIKNDIQIIAEALLIQFKQGLDRMTAGSDSLKGFKDIITTKKFKKVFPTLSLGLDKEVRYAYRGGFTWLNDRFKEKEIGEGMVFDVNSLYPAQMYSRLLPYGEPIVFEGKYVWDEDYPLHIQHIRCEFELKEGYIPTIQIKRSRFYKGNEYLKSSGGEIADLWLSNVDLELMKEHYDLYNVEYISGLKFKATTGLFKDFIDKWFYIKTTSYGAIKQLAKLMLNSLYGKFASNPDVTGKVPYLKENGALGFRLGEEETKDPVYTPMGVFITAWARYTTITAAQACYDRIIYCDTDSIHLTGTEIPDVIKDIVDPKKLGYWAHESTFKRAKYLRQKTYIQDIYMKEVDGYLVEGSPDDYTDIKFSVKCAGMTDKIKKEVTFENFKVGFSRKMKPKPVQVPGGVVLVDDTFTIK

SEQ ID NO: 96 - protein, 575 aa, Artificial
  mutant recombinant phi29-type DNA polymerase
MKHMPRKMYSCDFETTTKVEDCRVWAYGYMNIEDHSEYKIGNSLDEFMAWVLKVQADLYFHDLKFDGAFIINWLERNGFKWSADGLPNTYNTIISRMGQWYMIDICLGYKGKRKIHTVIYDSLKKLPFPVKKIAKDFKLTVLKGDIDYHKERPVGYKITPEEYAYIKNDIQIIAEALLIQFKQGLDRMTAGSDSLKGFKDIITTKKFKKVFPTLSLGLDKEVRYAYRGGFTWLNDRFKEKEIGEGMVFDVNSAYPAQMYSRLLPYGEPIVFEGKYVWDEDYPLHIQHIRCEFELKEGYIPTIQIKRSRFYKGNEYLKSSGGEIADLWLSNVDLELMKEHYDLYNVEYISGLKFKATTGLFKDFIDKWTYIKTTSYGAIKQLAKLMLNSLYGKFASNPDVTGKVPYLKENGALGFRLGEEETKDPVYTPMGVFITAWARYTTITAAQACYDRIIYCDTDSIHLTGTEIPDVIKDIVDPKKLGYWEHESTFKRAKYLRQKTYIQDIYMKEVDGYLVEGSPDDYTDIKFSVKCAGMTDKIKKEVTFENFKVGFSRKMKPKPVQVPGGVVLVDDTFTIK

SEQ ID NO: 97 - protein, 575 aa, Artificial
  mutant recombinant phi29-type DNA polymerase
MKHMPRKMYSCDFETTTKVEDCRVWAYGYMNIEDHSEYKIGNSLDEFMAWVLKVQADLYFHDLKFDGAFIINWLERNGFKWSADGLPNTYNTIISRMGQWYMIDICLGYKGKRKIHTVIYDSLKKLPFPVKKIAKDFKLTVLKGDIDYHKERPVGYKITPEEYAYIKNDIQIIAEALLIQFKQGLDRMTAGSDSLKGFKDIITTKKFKKVFPTLSLGLDKEVRYAYRGGFTWLNDRFKEKEIGEGMVFDVNSAYPAQMYSRLLPYGEPIVFEGKYVWDEDYPLHIQHIRCEFELKEGYIPTIQIKRSRFYKGNEYLKSSGGEIADLWLSNVDLELMKEHYDLYNVEYISGLKFKATTGLFKDFIDKWTYIKTTSYGAIKQLAKLMLNSLYGKFASNPDVTGKVPYLKENGALGFRLGEEETKDPVYTPMGVFITAWARYTTITAAQACYDRIIYCDTDSIHLTGTEIPDVIKDIVDPKKLGYWAHESTFKRAKYLRQKTYIQDIYMKEVDGYLVEGSPDDYTDIKFSVKCAGMTDKIKKEVTFENFKVGFSRKMKPKPVQVPGGVVLVDDTFTIK

SEQ ID NO: 98 - protein, 575 aa, Artificial
  mutant recombinant phi29-type DNA polymerase
MKHMPRKMYSCDFETTTKVEDCRVWAYGYMNIEDHSEYKIGNSLDEFMAWVLKVQADLYFHDLKFDGAFIINWLERNGFKWSADGLPNTYNTIISRMGQWYMIDICLGYKGKRKIHTVIYDSLKKLPFPVKKIAKDFKLTVLKGDIDYHKERPVGYKITPEEYAYIKNDIQIIAEALLIQFKQGLDRMTAGSDSLKGFKDIITTKKFKKVFPTLSLGLDKEVRYAYRGGFTWLNDRFKEKEIGEGMVFDVNSLYPAQMYSRLLPYGEPIVFEGKYVWDEDYPLHIQHIRCEFELKEGYIPTIQIKRSRFYKGNEYLKSSGGEIADLWLSNVDLELMKEHYDLYNVEYISGLKFKATTGLFKDFIDKWFYIKTTSYGAIKQLAKLMLNSLYGKFASNPDVTGKVPYLKENGALGFRLGEEETKDPVYTPMGVFITAWARYTTITAAQACYDRIIYCDTDSIHLTGTEIPDVIKDIVDPKKLGYWEHESTFKRAKYLRQKTYIQDIYMKEVDGYLVEGSPDDYTDIKFSVKCAGMTDKIKKEVTFENFKVGFSRKMKPKPVQVPGGVVLVDDTFTIK

SEQ ID NO: 99 - protein, 575 aa, Artificial; identical to SEQ ID NO: 98
  mutant recombinant phi29-type DNA polymerase

SEQ ID NO: 100 - protein, 575 aa, Artificial; identical to SEQ ID NO: 96
  mutant recombinant phi29-type DNA polymerase

SEQ ID NO: 101 - protein, 575 aa, Artificial; identical to SEQ ID NO: 96
  mutant recombinant phi29-type DNA polymerase

SEQ ID NO: 102 - protein, 575 aa, Artificial
  mutant recombinant phi29-type DNA polymerase
MKHMPRKMYSCDFETTTKVEDCRVWAYGYMNIEDHSEYKIGNSLDEFMAWVLKVQADLYFHDLKFDGAFIINWLERNGFKWSADGLPNTYNTIISRMGQWYMIDICLGYKGKRKIHTVIYDSLKKLPFPVKKIAKDFKLTVLKGDIDYMKERPVGYKITPEEYAYIKNDIQIIAEALLIQFKQGLDRMTAGSDSLKGFKDIITTKKFKKVFPTLSLGLDKEVRYAYRGGFTWLNDRFKEKEIGEGMVFDVNSLYPAQMYSRLLPYGEPIVFEGKYVWDEDYPLHIQHIRCEFELKEGYIPTIQIKRSRFYKGNEYLKSSGGEIADLWLSNVDLELMKEHYDLYNVEYISGLKFKATTGLFKDFIDKWFYIKTTSYGAIKQLAKLMLNSLYGKFASNPDVTGKVPYLKENGALGFRLGEEETKDPVYTPMGVFITAWARYTTITAAQACYDRIIYCDTDSIHLTGTEIPDVIKDIVDPKKLGYWAHESTFKRAKYLRQKTYIQDIYMKEVMGYLVEGSPDDYTMIKFSVKCAGMTDKIKKEVTFENFKVGFSRKMKPKPVQVPGGVVLVDDTFTIK

SEQ ID NO: 103 - protein, 575 aa, Artificial
  mutant recombinant phi29-type DNA polymerase
MKHMPRKMYSCDFETTTKVEDCRVWAYGYMNIEDHSEYKIGNSLDEFMAWVLKVQADLYFHHLKFDGAFIINWLERNGFKWSADGLPNTYNTIISRMGQWYMIDICLGYKGKRKIHTVIYDSLKKLPFPVKKIAKDFKLTVLKGDIDYHKERPVGYKITPEEYAYIKNDIQIIAEALLIQFKQGLDRMTAGSDSLKGFKDIITTKKFKKVFPTLSLGLDKEVRYAYRGGFTWLNDRFKEKEIGEGMVFDVNSLYPAQMYSRLLPYGEPIVFEGKYVWDEDYPLHIQHIRCEFELKEGYIPTIQIKRSRFYKGNEYLKSSGGEIADLWLSNVDLELMKEHYDLYNVEYISGLKFKATTGLFKDFIDKWTYIKTTSYGAIKQLAKLMLNSLYGKFASNPDVTGKVPYLKENGALGFRLGEEETKDPVYTPMGVFITAWARYTTITAAQACYDRIIYCDTDSIHLTGTEIPDVIKDIVDPKKLGYWEHESTFKRAKYLRQKTYIQDIYMKRVDGYLVEGSPDDYTDIKFSVKCAGMTDKIKKEVTFENFKVGFSRKMKPKPVQVPGGVVLVDDTFTIK

SEQ ID NO: 104 - protein, 575 aa, Artificial
  mutant recombinant phi29-type DNA polymerase
MKHMPRKMYSCRFETTTKVEDCRVWAYGYMNIEDHSEYKIGNSLDEFMAWVLKVQADLYFHHLKFDGAFIINWLERNGFKWSADGLPNTYNTIISRMGQWYMIDICLGYKGKRKIHTVIYDSLKKLPFPVKKIAKDFKLTVLKGDIDYHKERPVGYKITPEEYAYIKNDIQIIAEALLIQFKQGLDRMTAGSDSLKGFKDIITTKKFKKVFPTLSLGLDKEVRYAYRGGFTWLNDRFKEKEIGEGMVFDVNSLYPAQMYSRLLPYGEPIVFEGKYVWDEDYPLHIQHIRCEFELKEGYIPTIQIKRSRFYKGNEYLKSSGGEIADLWLSNVDLELMKEHYDLYNVEYISGLKFKATTGLFKDFIDKWFYIKTTSYGAIKQLAKLMLNSLYGKFASNPDVTGKVPYLKENGALGFRLGEEETKDPVYTPMGVFITAWARYTTITAAQACYDRIIYCDTDSIHLTGTEIPDVIKDIVDPKKLGYWEHESTFKRAKYLRQKTYIQDIYMKEVDGYLVEGSPDDYTDIKFSVKCAGMTDKIKKEVTFENFKVGFSRKMKPKPVQVPGGVVLVDDTFTIK

SEQ ID NO: 105 - protein, 579 aa, Artificial
  mutant recombinant phi29-type DNA polymerase
MKHMPRKMYSCRFETTTKVEDCRVWAYGYMNIEDHSEYKIGNSLDEFMAWVLKVQADLYFHNLKFDGAFIINWLERNGFKWSADGLPNTYNTIISRMGQWYMIDICLGYKGKRKIHTVIYDSLKKLPFPVKKIAKDFKLTVLKGDIDYHKERPVGYKITPEEYAYIKNDIQIIAEALLIQFKQGLDRMTAGSDSLKGFKDIITTKKFKKVFPTLSLGLDKEVRYAYRGGFTWLNDRFKEKEIGEGMVFDVNSLYPAQMYSRLLPYGEPIVFEGKYVWDEDYPLHIQHIRCEFELKEGYIPTIQIKRSRFYKGNEYLKSSGGEIADLWLSNVDLELMKEHYDLYNVEYISGLKFKATTGLFKDFIDKWFYIKTTSYGAIKQLAKLMLNSLYGKFASNPDVTGKVPYLKENGALGFRLGEEETKDPVYTPMGVFITAWARYTTITAAQACYDRIIYCDTDSIHLTGTEIPDVIKDIVDPKKLGYWEHESTFKRAKYLRQKTYIQDIYMKRVDGKSKGSLVEGSPDDYTDIKFSVKCAGMTDKIKKEVTFENFKVGFSRKMKPKPVQVPGGVVLVDDTFTIK

SEQ ID NO: 106 - protein, 579 aa, Artificial
  mutant recombinant phi29-type DNA polymerase
MKHMPRKMYSCRFETTTKVEDCRVWAYGYMNIEDHSEYKIGNSLDEFMAWVLKVQADLYFHNLKFDGAFIINWLERNGFKWSADGLPNTYNTIISRMGQWYMIDICLGYKGKRKIHTVIYDSLKKLPFPVKKIAKDFKLTVLKGDIDYHKERPVGYKITPEEYAYIKNDIQIIAEALLIQFKQGLDRMTAGSDSLKGFKDIITTKKFKKVFPTLSLGLDKEVRYAYRGGFTWLNDRFKEKEIGEGMVFDVNSLYPAQMYSRLLPYGEPIVFEGKYVWDEDYPLHIQHIRCEFELKEGYIPTIQIKRSRFYKGNEYLKSSGGEIADLWLSNVDLELMKEHYDLYNVEYISGLKFKATTGLFKDFIDKWFYIKTTSYGAWKQLAKLMLNSLYGKFASNPDVTGKVPYLKENGALGFRLGEEETKDPVYTPMGVFITAWARYTTITAAQACYDRIIYCDTDSIHLTGTEIPDVIKDIVDPKKLGYWEHESTFKRAKYLRQKTYIQDIYMKRVDGKSKGSLVEGSPDDYTDIKFSVKCAGMTDKIKKEVTFENFKVGFSRKMKPKPVQVPGGVVLVDDTFTIK

SEQ ID NO: 107 - protein, 575 aa, Artificial
  mutant recombinant phi29-type DNA polymerase
MKHMPRKMYSCDFETTTKVEDCRVWAYGYMNIEDHSEYKIGNSLDEFMAWVLKVQADLYFHNLKFDGAFIINWLERNGFKWSADGLPNTYNTIISRMGQWYMIDICLGYKGKRKIHTVIYDSLKKLPFPVKKIAKDFKLTVLKGDIDAHKERPVGYKITPEEYAYIKNDIQIIAEALLIQFKQGLDRMTAGSDSLKGFKDIITTKKFKKVFPTLSLGLDKEVRYAYRGGFTWLNDRFKEKEIGEGMVFDVNSLYPAQMYSRLLPYGEPIVFEGKYVWDEDYPLHIQHIRCEFELKEGYIPTIQIKRSRFYKGNEYLKSSGGEIADLWLSNVDLELMKEHYDLYNVEYISGLKFKATTGLFKDFIDKWTYIKTTSYGAIKQLAKLMLNSLYGKFASNPDVTGKVPYLKENGALGFRLGEEETKDPVYTPMGVFITAWARYTTITAAQACYDRIIYCDTDSIHLTGTEIPDVIKDIVDPKKLGYWEHESTFKRAKYLRQKTYIQDIYMKEVDGYLVEGSPDDYTDIKFSVKCAGMTDKIKKEVTFENFKVGFSRKMKPKPVQVPGGVVLVDDTFTIK

SEQ ID NO: 108 - protein, 575 aa, Artificial
  mutant recombinant phi29-type DNA polymerase
MKHMPRKMYSCDFETTTKVEDCRVWAYGYMNIEDHSEYKIGNSLDEFMAWVLKVQADLYFHDLKFDGAFIINWLERNGFKWSADGLPNTYNTIISRMGQWYMIDICLGYKGKRKIHTVIYDSLKKLPFPVKKIAKDFKLTVLKGDIDYHKERPVGYKITPEEYAYIKNDIQIIAEALLIQFKQGLDRMTEGSDSLKGFKDIITTKKFKKVFPTLSLGLDKEVRYAYRGGFTWLNDRFKEKEIGEGMVFDVNSLYPAQMYSRLLPYGEPIVFEGKYVWDEDYPLHIQHIRCEFELKEGYIPTIQIKRSRFYKGNEYLKSSGGEIADLWLSNVDLELMKEHYDLYNVEYISGLKFKATTGLFKDFIDKWTYIKTTSYGAIKQLAKLMLNSLYGKFASNPDVTGKVPYLKENGALGFRLGEEETADPVYTPMGVFITAWARYTTITAAQACYDRIIYCDTDSIHLTGTEIPDVIKDIVDPKKLGYWEHESTFKRAKYLRQKTYIQDIYMKRVDGYLVEGSPDDYTDIKFSVKCAGMTDKIKKEVTFENFKVGFSRKMKPKPVQVPGGVVLVDDTFTIK

SEQ ID NO: 109 - protein, 579 aa, Artificial
  mutant recombinant phi29-type DNA polymerase
MKHMPRKMYSCDFETTTKVEDCRVWAYGYMNIEDHSEYKIGNSLDEFMAWVLKVQADLYFHDLKFDGAFIINWLERNGFKWSADGLPNTYNTYISRMGQWYMIDICLGYKGKRKIHTVIYDSLKKLPFPVKKIAKDFKLTVLKGDIDYHKERPVGYKITPEEYAYIKNDIQIIAEALLIQFKQGLDRMTAGSDSLKGFKDIITTKKFKKVFPTLSLGLDKEVRYAYRGGFTWLNDRFKEKEIGEGMVFDVNSLYPAQMYSRLLPYGEPIVFEGKYVWDEDYPLHIQHIRCEFELKEGYIPTIQIKRSRFYKGNEYLKSSGGEIADLWLSNVDLELMKEHYDLYNVEYISGLKFKATTGLFKDFIDKWFYIKYTSYGAWKQLAKLMLNSLYGKFASNPDVTGKVPYLKENGALGFRLGEEETKDPVYTPMGVFITAWARYTTITAAQACYDRIIYCDTDSIHLTGTEIPDVIKDIVDPYKLGYWEHESTFKRAKYLRQKTYIQDIYMKRVDGKSYGSLVEGSPDDYTDIKFSVKCAGMTDKIKKEVTFENFKVGFSRKMKPKPVQVPGGVVLVDDTFTIK

SEQ ID NO: 110 - protein, 575 aa, Artificial
  mutant recombinant phi29-type DNA polymerase
MKHMPRKMYSCDFETTTKVEDCRVWAYGYMNIEDHSEYKIGNSLDEFMAWVLKVQADLYFHDLKFDGAFIINWLERNGFKWSADGLPNTYNTIISRMGQWYMIDICLGYKGKRKIHTVIYDSLKKLPFPVKKIAKDFKLTVLKGDIDYHKERPVGYKITPEEYAYIKNDIQIIAEALLIQFKQGLDRMTAGSDSLKGFKDIITTKKFKKVFPTLSLGLDKEVRYAYRGGFTWLNDRFKEKEIGEGMVFDVNSLYPAQMYSRLLPYGEPIVFEGKYVWDEDYPLHIQHIRCEFELKEGYIPTIQIKRSRFYKGNEYLKSSGGEIADLWLSNVDLELMKEHYDLYNVEYISGLKFKATTGLFKDFIDKWFYIKTTSYGAIKQLAKLMLNSLYGKFASNPDVTGKVPYLKENGALGFRLGEEETKDPVYTPMGVFITAWARYTTITAAQACYDRIIYCDTDSIHLTGTEIPDVIKDIVDQKKLGYWEHESTFKRAKYLRQKTYIQDIYMKEVDGYLVEGSPDDYTDIKFSVKCAGMTDKIKKEVTFENFKVGFSRKMKPKPVQVPGGVVLVDDTFTIK

SEQ ID NO: 111 - protein, 575 aa, Artificial
  mutant recombinant phi29-type DNA polymerase
MKHMPRKMYSCDFETTTKVEDCRVWAYGYMNIEDHSEYKIGNSLDEFMAWVLKVQADLYFHDLKFDGAFIINWLERNGFKWSADGLPNTYNTIISRMGQWYMIDICLGYKGKRKIHTVIYDSLKKLPFPVKKIAKDFKLTVLKGDIDYHKERPVGYKITPEEYAYIKNDIQIIAEALLIQFKQGLDRMTAGSDSLKGFKDIITTKKFKKVFPTLSLGLDKEVRYAYRGGFTWLNDRFKEKEIGEGMVFDVNSLYPAQMYSRLLPYGEPIVFEGKYVWDEDYPLHIQHIRCEFELKEGYIPTIQIKRSRFYKGNEYLKSSGGEIADLWLSNVDLELMKEHYDLYNVEYISGLKFKATTGLFKDFIDKWFYIKTTSYGAIKQLAKMMLNSLYGKFASNPDVTGKVPYLKENGALGFRLGEEETKDPVYTPMGVFITAWARYTTITAAQACYDRIIYCDTDSIHLTGTEIPDVIKDIVDPKKLGYWEHESTFKRAKYLRQKTYIQDIYMKEVDGYLVEGSPDDYTDIKFSVKCAGMTDKIKKEVTFENFKVGFSRKMKPKPVQVPGGVVLVDDTFTIK

SEQ ID NO: 112 - protein, 575 aa, Artificial
  mutant recombinant phi29-type DNA polymerase
MKHMPRKMYSCDFETTTKVEDCRVWAYGYMNIEDHSEYKIGNSLDEFMAWVLKVQADLYFHNLKFDGAFIINWLERNGFKWSADGLPNTYNTIISRMGQWYMIDICLGYKGKRKIHTVIYDSLKKLPFPVKKIAKDFKLTVLKGDIDYHKERPVGYKITPEEYAYIKNDIQIIAEALLIQFKQGLDRMTAGSDSLKGFKDIITTKKFKKVFPTLSLGLDKEVRYAYRGGFTWLNDRFKEKEIGEGMVFDVNSLYPAQMYSRLLPYGEPIVFEGKYVWDEDYPLHIQHIRCEFELKEGYIPTIQIKRSRFYKGNEYLKSSGGEIADLWLSNVDLELMKEHYDLYNVEYISGLKFKATTGLFKDFIDKWFYIKTTSYGAIKQLAKLMLNSLYGKFASNPDVTGKVPYLKENGALGFRLGEEETKDPVYTPMGVFITAWARYTTITAAQACYDRIIYCDTDSIHLTGTEIPDVIKDIVDEKKLGYWAHESTFKRAKYLRQKTYIQDIYMKEVDGYLVEGSPDDYTDIKFSVKCAGMTDKIKKEVTFENFKVGFSRKMKPKPVQVPGGVVLVDDTFTIK

SEQ ID NO: 113 - protein, 575 aa, Artificial
  mutant recombinant phi29-type DNA polymerase
MKHMPRKMYSCDFETTTKVEDCRVWAYGYMNIEDHSEYKIGNSLDEFMAWVLKVQADLYFHNLKFDGAFIINWLERNGFKWSADGLPNTYNTIISRMGQWYMIDICLGYKGKRKIHTVIYDSLKKLPFPVKKIAKDFKLTVLKGDIDYHKERPVGYKITPEEYAYIKNDIQIIAEVLLIQFKQGLDRMTAGSDSLKGFKDIITTKKFKKVFPTLSLGLDKEVRYAYRGGFTWLNDRFKEKEIGEGMVFDVNSLYPAQMYSRLLPYGEPIVFEGKYVWDEDYPLHIQHIRCEFELKEGYIPTIQIKRSRFYKGNEYLKSSGGEIADLWLSNVDLELMKEHYDLYNVEYISGLKFKATTGLFKDFIDKWFYIKTTSYGAIKQLAKLMLNSLYGKFASNPDVTGKVPYLKENGALGFRLGEEETKDPVYTPMGVFITAWARYTTITAAQACYDRIIYCDTDSIHLTGTEIPDVIKDIVDPKKLGYWAHESTFKRAKYLRQKTYIQDIYMKEVDGYLVEGSPDDYTDIKFSVKCAGMTDKIKKEVTFENFKVGFSRKMKPKPVQVPGGVVLVDDTFTIK

SEQ ID NO: 114 - protein, 575 aa, Artificial
  mutant recombinant phi29-type DNA polymerase
MKHMPRKMYSCDFETTTKVEDCRVWAYGYMNIEDHSEYKIGNSLDEFMAWVLKVQADLYFHNLKFDGAFIINWLERNGFKWSADGLPNTYNTIISRMGQWYMIDICLGYKGKRKIHTVIYDSLKKLPFPVKKIAKDFKLTVLKGDIDYHKERPVGYKITPEEYAYIKNDIQIIAEALLIQFKQGLDRMTAGSDSLKGFKDIITTKKFKKVFPTLSLGLDKEVRYAYRGGFTWLNDRFKEKEIGEGMVFDVNSLYPAQMYSRLLPYGEPIVFEGKYVWDEDYPLHIQHIRCEFELKEGYIPTIQIKRSRFYKGNEYLKSSGGEIADLWLSNVDLELMKEHYDLYNVEYISGLKFKATTGLFKDFIDKWFYIKTTSYGAIKQLAKLMLNSLYGKFASNPDVTGKVPYLKENGALGFRLGEEETRDPVYTPMGVFITAWARYTTITAAQACYDRIIYCDTDSIHLTGTEIPDVIKDIVDPKKLGYWAHESTFKRAKYLRQKTYIQDIYMKEVDGYLVEGSPDDYTDIKFSVKCAGMTDKIKKEVTFENFKVGFSRKMKPKPVQVPGGVVLVDDTFTIK

SEQ ID NO: 115 - protein, 575 aa, Artificial
  mutant recombinant phi29-type DNA polymerase
MKHMPRKMYSCDFETTTKVEDCRVWAYGYMNIEDHSEYKIGNSLDEFMAWVLKVQADLYFHDLKFDGAFIINWLERNGFKWSADGLPNTYNTIISRMGQWYMIDICLGYKGKRKIHTVIYDSLKKLPFPVKKIAKDFKLTVLKGDIDYHKERPVGYKITPEEYAYIKNDIQIIAEALLIQFKQGLDRMTAGSDSLKGFKDIITTKKFKKVFPTLSLGLDKEVRYAYRGGFTWLNDRFKEKEIGEGMVFDVNSLYPAQMYSRLLPYGEPIVFEGKYVWDEDYPLHIQHIRCEFELKEGYIPTIQIKRSRFYKGNEYLKSSGGEIADLWLSNVDLELMKEHYDLYNVEYISGLKFKATTGLFKDFIDKWTYIKTTSYGAIKQLAKLMLNSLYGKFASNPDVTGKVPYLKENGALGFRLGEEETKDPVYTPMGVFITAWARYTTITAAQACYDRIIYCDTDSIHLTGTEIPDVIKDIVDQKKLGYWEHESTFKRAKYLRQKTYIQDIYMKEVDGYLVEGSPDDYTDIKFSVKCAGMTDKIKKEVTFENFKVGFSRKMKPKPVQVPGGVVLVDDTFTIK

SEQ ID NO: 116 - protein, 575 aa, Artificial
  mutant recombinant phi29-type DNA polymerase
MKHMPRKMYSCDFETTTKVEDCRVWAYGYMNIEDHSEYKIGNSLDEFMAWVLKVQADLYFHNLKFDGAFIINWLERNGFKWSADGLPNTYNTFISRMGQWYMIDICLGYKGKRKIHTVIYDSLKKLPFPVKKIAKDFKLTVLKGDIDYHKERPVGYKITPEEYAYIKNDIQIIAEALLIQFKQGLDRMTAGSDSLKGFKDIITTKKFKKVFPTLSLGLDKEVRYAYRGGFTWLNDRFKEKEIGEGMVFDVNSLYPAQMYSRLLPYGEPIVFEGKYVWDEDYPLHIQHIRCEFELKEGYIPTIQIKRSRFYKGNEYLKSSGGEIADLWLSNVDLELMKEHYDLYNVEYISGLKFKATTGLFKDFIDKWFYIKTTSYGAIKQLAKLMLNSLYGKFASNPDVTGKVPYLKENGALGFRLGEEETKDPVYTPMGVFITAWARYTTITAAQACYDRIIYCDTDSIHLTGTEIPDVIKDIVDPKKLGYWEHESTFKRAKYLRQKTYIQDIYMKEVDGYLVEGSPDDYTDIKFSVKCAGMTDKIKKEVTFENFKVGFSRKMKPKPVQVPGGVVLVDDTFTIK

SEQ ID NO: 117 - protein, 575 aa, Artificial
  mutant recombinant phi29-type DNA polymerase
MKHMPRKMYSCDFETTTKVEDCRVWAYGYMNIEDHSEYKIGNSLDEFMAWVLKVQADLYFHNLKFDGAFIINWLERNGFKWSADGLPNTYNTIISRMGQWYMIDICLGYKGKRKIHTVIYDSLKKLPFPVKKIAKDFKLTVLKGDIDYHKERPVGYKITPEEYAYIKNDIQIIAEALLIQFKQGLDRMTAGSDSLKGFKDIITTKKFKKVFPTLSLGLDKEVRYAYRGGFTWLNDRFKEKEIGEGMVFDVNSAYPAQMYSRLLPYGEPIVFEGKYVWDEDYPLHIQHIRCEFELKEGYIPTIQIKRSRFYKGNEYLKSSGGEIADLWLSNVDLELMKEHYDLYNVEYISGLKFKATTGLFKDFIDKWTYIKTTSYGAIKQLAKLMLNSLYGKFASNPDVTGKVPYLKENGALGFRLGEEETKDPVYTPMGVFITAWARYTTITAAQACYDRIIYCDTDSIHLTGTEIPDVIKDIVDPKKLGYWEHESTFKRAKYLRQKTYIQDIYMKEVDGYLVEGSPDDYTDIKFSVKCAGMTDKIKKEVTFENFKVGFSRKMKPKPVQVPGGVVLVDDTFTIK

SEQ ID NO: 118 - protein, 575 aa, Artificial
  mutant recombinant phi29-type DNA polymerase
MKHMPRKMYSCDFETTTKVEDCRVWAYGYMNIEDHSEYKIGNSLDEFMAWVLKVQADLYFHDLKFDGAFIINWLERNGFKWSADGLPNTYNTIISRMGQWYMIDICLGYKGKRKIHTVIYDSLKKLPFPVKKIAKDFKLTVLKGDIDYHKERPVGYKITPEEYAYIKNDIQIIAEALLIQFKQGLDRMTAGSDSLKGFKDIITTKKFKKVFPTLSLGLDKEVRYAYRGGFTWLNDRFKEKEIGEGMVFDVNSAYPAQMYSRLLPYGEPIVFEGKYVWDEDYPLHIQHIRCEFELKEGYIPTIQIKRSRFYKGNEYLKSSGGEIADLWLSNVDLELMKEHYDLYNVEYISGLKFKATTGLFKDFIDKWTYIKTTSYGAIKQLAKLMLNSLYGKFASNPDVTGKVPYLKENGALGFRLGEEMTKDPVYTPMGVFITAWARYTTITAAQACYDRIIYCDTDSIHLTGTEIPDVIKDIVDPKKLGYWEHESTFKRAKYLRQKTYIQDIYMKEVDGYLVEGSPDDYTDIKFSVKCAGMTDKIKKEVTFENFKVGFSRKMKPKPVQVPGGVVLVDDTFTIK

SEQ ID NO: 119 - protein, 575 aa, Artificial
  mutant recombinant phi29-type DNA polymerase
MKHMPRKMYSCDFETTTKVEDCRVWAYGYMNIEDHSEYKIGNSLDEFMAWVLKVQADLYFHDLKFDGAFIINWLERNGFKWSADGLPNTYNTIISRMGQWYMIDICLGYKGKRKIHTVIYDSLKKLPFPVKKIAKDFKLTVLKGDIDYHKERPVGYKITPEEYAYIKNDIQIIAEALLIQFKQGLDRMTAGSDSLKGFKDIITTKKFKKVFPTLSLGLDKEVRYAYRGGFTWLNDRFKEKEIGEGMVFDVNSAYPAQMYSRLLPYGEPIVFEGKYVWDEDYPLHIQHIRCEFELKEGYIPTIQIKRSRFYKGNEYLKSSGGEIADLWLSNVDLELMKEHYDLYNVEYISGLKFKATTGLFKDFIDKWTYIKTTSYGAIKQLAKLMLNSLYGKFASNPDVTGKVPYLKENGALGFRLGEEETADPVYTPMGVFITAWARYTTITAAQACYDRIIYCDTDSIHLTGTEIPDVIKDIVDPKKLGYWEHESTFKRAKYLRQKTYIQDIYMKEVDGYLVEGSPDDYTDIKFSVKCAGMTDKIKKEVTFENFKVGFSRKMKPKPVQVPGGVVLVDDTFTIK

SEQ ID NO: 120 - protein, 575 aa, Artificial
  mutant recombinant phi29-type DNA polymerase
MKHMPRKMYSCDFETTTKVEDCRVWAYGYMNIEDHSEYKIGNSLDEFMAWVLKVQADLYFHDLKFDGAFIINWLERNGFKWSADGLPNTYNTIISRMGQWYMIDICLGYKGKRKIHTVIYDSLKKLPFPVKKIAKDFKLTVLKGDIDYHKERPVGYKITPEEYAYIKNDIQIIAEALLIQFKQGLDRMTAGSDSLKGFKDIITTKKFKKVFPTLSLGLDKEVRYAYRGGFTWLNDRFKEKEIGEGMVFDVNSAYPAQMYSRLLPYGEPIVFEGKYVWDEDYPLHIQHIRCEFELKEGYIPTIQIKRSRFYKGNEYLKSSGGEIADLWLSNVDLELMKEHYDLYNVEYISGLKFKATTGLFKDFIDKWTYIKTTSYGAIKQLAKLMLNSLYGKFASNPDVTGKVPYLKENGALGFRLGEEETKDPVYTPMGVFITAWARYTTITAAQACYDRIIYCDTDSIHLTGTEIPDVIKDIVDPKKLGYWEHESTFKRAKYLRQKTYIQDIYMKKVDGYLVEGSPDDYTDIKFSVKCAGMTDKIKKEVTFENFKVGFSRKMKPKPVQVPGGVVLVDDTFTIK

SEQ ID NO: 121 - protein, 575 aa, Artificial
  mutant recombinant phi29-type DNA polymerase
MKHMPRKMYSCDFETTTKVEDCRVWAYGYMNIEDHSEYKIGNSLDEFMAWVLKVQADLYFHDLKFDGAFIINWLERNGFKWSADGLPNTYNTIISRMGQWYMIDICLGYKGKRKIHTVIYDSLKKLPFPVKKIAKDFKLTVLKGDIDYHKERPVGYKITPEEYAYIKNDIQIIAEALLIQFKQGLDRMTAGSDSLKGFKDIITTKKFKKVFPTLDLGLDKEVRYAYRGGFTWLNDRFKEKEIGEGMVFDVNSAYPAQMYSRLLPYGEPIVFEGKYVWDEDYPLHIQHIRCEFELKEGYIPTIQIKRSRFYKGNEYLKSSGGEIADLWLSNVDLELMKEHYDLYNVEYISGLKFKATTGLFKDFIDKWTYIKTTSYGAIKQLAKLMLNSLYGKFASNPDVTGKVPYLKENGALGFRLGEEETKDPVYTPMGVFITAWARYTTITAAQACYDRIIYCDTDSIHLTGTEIPDVIKDIVDPKKLGYWEHESTFKRAKYLRQKTYIQDIYMKEVDGYLVEGSPDDYTDIKFSVKCAGMTDKIKKEVTFENFKVGFSRKMKPKPVQVPGGVVLVDDTFTIK

SEQ ID NO: 122 - protein, 575 aa, Artificial
  mutant recombinant phi29-type DNA polymerase
MKHMPRKMYSCDFETTTKVEDCRVWAYGYMNIEDHSEYKIGNSLDEFMAWVLKVQADLYFHDLKFDGAFIINWLERNGFKWSADGLPNTYNTIISRMGQWYMIDICLGYKGKRKIHTVIYDSLKKLPFPVKKIAKDFKLTVLKGDIDYHKERPVGYKITPEEYAYIKNDIQIIAEALLIQFKQGLDRMTAGSDSLKGFKDIITTKKFKKVFPTLSLGLDKEVRYAYRGGFTWLNDRFKEKEIGEGMVFDVNSTYPAQMYSRLLPYGEPIVFEGKYVWDEDYPLHIQHIRCEFELKEGYIPTIQIKRSRFYKGNEYLKSSGGEIADLWLSNVDLELMKEHYDLYNVEYISGLKFKATTGLFKDFIDKWTYIKTTSYGAIKQLAKLMLNSLYGKFASNPDVTGKVPYLKENGALGFRLGEEETKDPVYTPMGVFITAWARYTTITAAQACYDRIIYCDTDSIHLTGTEIPDVIKDIVDPKKLGYWEHESTFKRAKYLRQKTYIQDIYMKEVDGYLVEGSPDDYTDIKFSVKCAGMTDKIKKEVTFENFKVGFSRKMKPKPVQVPGGVVLVDDTFTIK

SEQ ID NO: 123 - protein, 575 aa, Artificial
  mutant recombinant phi29-type DNA polymerase
MKHMPRKMYSCDFETTTKVEDCRVWAYGYMNIEDHSEYKIGNSLDEFMAWVLKVQADLYFHDLKFDGAFIINWLERNGFKWSADGLPNTYNTIISRMGQWYMIDICLGYKGKRKIHTVIYDSLKKLPFPVKKIAKDFKLTVLKGDIDYHKERPVGYKITPEEYAYIKNDIQIIAEALLIQFKQGLDRMTAGSDSLKGFKDIITTKKFKKVFPTLSLGLDKEVRYAYRGGFTWLNDRFKEKEIGEGMVFDVNSAYPAQMYSRLLPYGEPIVFEGKYVWDEDYPLHIQHIRCEFELKEGYIPTIQIKRSRFYKGNEYLKSSGGEIADLWLSNVDLELMKEHYDLYNVEYISGLKFKATTGLFKDFIDKWTHIKTTSYGAIKQLAKLMLNSLYGKFASNPDVTGKVPYLKENGALGFRLGEEETKDPVYTPMGVFITAWARYTTITAAQACYDRIIYCDTDSIHLTGTEIPDVIKDIVDPKKLGYWEHESTFKRAKYLRQKTYIQDIYMKEVDGYLVEGSPDDYTDIKFSVKCAGMTDKIKKEVTFENFKVGFSRKMKPKPVQVPGGVVLVDDTFTIK

SEQ ID NO: 124 - protein, 575 aa, Artificial
  mutant recombinant phi29-type DNA polymerase
MKHMPRKMYSCDFETTTKVEDCRVWAYGYMNIEDHSEYKIGNSLDEFMAWVLKVQADLYFHDLKFDGAFIINWLERNGFKWSADGLPNTYNTIISRMGQWYMIDICLGYKGKRKIHTVIYDSLKKLPFPVKKIAKDFKLTVLKGDIDYHKERPVGYKITPEEYAYIKNDIQIIAEALLIQFKQGLDRMTAGSDSLKGFKDIITTKKFKKVFPTLSLGLDKEVRYAYRGGFTWLNDRFKEKEIGEGMVFDVNSAYPAQMYSRLLPYGEPIVFEGKYVWDEDYPLHIQHIRCEFELKEGYIPTIQIKRSRFYKGNEYLKSSGGEIADLWLSNVDLELMKEHYDLYNVEYISGLKFKATTGLFKDFIDKWTGIKTTSYGAIKQLAKLMLNSLYGKFASNPDVTGKVPYLKENGALGFRLGEEETKDPVYTPMGVFITAWARYTTITAAQACYDRIIYCDTDSIHLTGTEIPDVIKDIVDPKKLGYWEHESTFKRAKYLRQKTYIQDIYMKEVDGYLVEGSPDDYTDIKFSVKCAGMTDKIKKEVTFENFKVGFSRKMKPKPVQVPGGVVLVDDTFTIK

SEQ ID NO: 125 - protein, 575 aa, Artificial
  mutant recombinant phi29-type DNA polymerase
MKHMPRKMYSCDFETTTKVEDCRVWAYGYMNIEDHSEYKIGNSLDEFMAWVLKVQADLYFHDLKFDGAFIINWLERNGFKWSADGLPNTYNTIISRMGQWYMIDICLGYKGKRKIHTVIYDSLKKLPFPVKKIAKDFKLTVLKGDIDYHKERPVGYKITPEEYAYIKNDIQIIAEALLIQFKQGLDRMTAGSDSLKGFKDIITTKKFKKVFPTLSLGLDKEVRYAYRGGFTWLNDRFKEKEIGEGMVFDVNSAYPAQMYSRLLPYGEPIVFEGKYVWDEDYPLHIQHIRCEFELKEGYIPTIQIKRSRFYKGNEYLKSSGGEIADLWLSNVDLELMKEHYDLYNVEYISGLKFKATTGLFKDFIDKWTLIKTTSYGAIKQLAKLMLNSLYGKFASNPDVTGKVPYLKENGALGFRLGEEETKDPVYTPMGVFITAWARYTTITAAQACYDRIIYCDTDSIHLTGTEIPDVIKDIVDPKKLGYWEHESTFKRAKYLRQKTYIQDIYMKEVDGYLVEGSPDDYTDIKFSVKCAGMTDKIKKEVTFENFKVGFSRKMKPKPVQVPGGVVLVDDTFTIK

SEQ ID NO: 126 - protein, 575 aa, Artificial
  mutant recombinant phi29-type DNA polymerase
MKHMPRKMYSCDFETTTKVEDCRVWAYGYMNIEDHSEYKIGNSLDEFMAWVLKVQADLYFHDLKFDGAFIINWLERNGFKWSADGLPNTYNTIISRMGQWYMIDICLGYKGKRKIHTVIYDSLKKLPFPVKKIAKDFKLTVLKGDIDYHKERPVGYKITPEEYAYIKNDIQIIAEALLIQFKQGLDRMTAGSDSLKGFKDIITTKKFKKVFPTLSLGLDKEVRYAYRGGFTWLNDRFKEKEIGEGMVFDVNSAYPAQMYSRLLPYGEPIVFEGKYVWDEDYPLHIQHIRCEFELKEGYIPTIQIKRSRFYKGNEYLKSSGGEIADLWLSNVDLELMKEHYDLYNVEYISGLKFKATTGLFKDFIDKWTYIKTTSFGAIKQLAKLMLNSLYGKFASNPDVTGKVPYLKENGALGFRLGEEETKDPVYTPMGVFITAWARYTTITAAQACYDRIIYCDTDSIHLTGTEIPDVIKDIVDPKKLGYWEHESTFKRAKYLRQKTYIQDIYMKEVDGYLVEGSPDDYTDIKFSVKCAGMTDKIKKEVTFENFKVGFSRKMKPKPVQVPGGVVLVDDTFTIK

SEQ ID NO: 127 - protein, 575 aa, Artificial
  mutant recombinant phi29-type DNA polymerase
MKHMPRKMYSCDFETTTKVEDCRVWAYGYMNIEDHSEYKIGNSLDEFMAWVLKVQADLYFHNLKFRGAFIINWLERNGFKWSADGLPNTYNTIISRMGQWYMIDICLGYKGKRKIHTVIYDSLKKLPFPVKKIAKDFKLTVLKGDIDYHKERPVGYKITPEEYAYIKNDIQIIAEALLIQFKQGLDRMTAGSDSLKGFKDIITTKKFKKVFPTLSLGLDKEVRYAYRGGFTWLNDRFKEKEIGEGMVFDVNSAYPAQMYSRLLPYGEPIVFEGKYVWDEDYPLHIQHIRCEFELKEGYIPTIQIKRSRFYKGNEYLKSSGGEIADLWLSNVDLELMKEHYDLYNVEYISGLKFKATTGLFKDFIDKWTYIKTTSYGAIKQLAKLMLNSLYGKFASNPDVTGKVPYLKENGALGFRLGEEETKDPVYTPMGVFITAWARYTTITAAQACYDRIIYCDTDSIHLTGTEIPDVIKDIVDPKKLGYWEHESTFKRAKYLRQKTYIQDIYMKEVDGYLVEGSPDDYTDIKFSVKCAGMTDKIKKEVTFENFKVGFSRKMKPKPVQVPGGVVLVDDTFTIK

SEQ ID NO: 128 - protein, 575 aa, Artificial
  mutant recombinant phi29-type DNA polymerase
MKHMPRKMYSCDFETTTKVEDCRVWAYGYMNIEDHSEYKIGNSLDEFMAWVLKVQADLYFHDLKFDGAFIINWLERNGFKWSADGLPNTYNTIISRMGQWYMIDICLGYKGKRKIHTVIYDSLKKLPFPVKKIAKDFKLTVLKGDIDYHKERPVGYKITPEEYAYIKNDIQIIAEALLIQFKQGLDRMTAGSDSLKGFKDIITTKKFKKVFPTLSLGLDKEVRYAYRGGFTWLNDRFKEKEIGEGMVFDVNSAYPAQMYSRLLPYGEPIVFEGKYVWDEDYPLHIQHIRCEFELKEGYIPTIQIKRSRFYKGNEYLKSSGGEIADLWLSNVDLELMKEHYDLYNVEYISGLKFKATTGLFKDFIDKWTYIKTTSYGAIKQLAKLMLNSLYGKFASNPDVTGKVPYLKENGALGFRLGEEETKDPVYTPMGVFITAWARYTTITAAQACYDRIIYCDTDSIHLTGTEIPDVIKDIVDPKKLGYWEHESTFKRAKYLRQKTYIQDRYMKEVDGYLVEGSPDDYTDIKFSVKCAGMTDKIKKEVTFENFKVGFSRKMKPKPVQVPGGVVLVDDTFTIK

SEQ ID NO: 129 - protein, 575 aa, Artificial
  mutant recombinant phi29-type DNA polymerase
MKHMPRKMYSCDFETTTKVEDCRVWAYGYMNIEDHSEYKIGNSLDEFMAWVLKVQADLYFHDLKFDGAFIINWLERNGFKWSADGLPNTYNTIISRMGQWYMIDICLGYKGKRKIHTVIYDSLKKLPFPVKKIAKDFKLTVLKGDIDYHKERPVGYKITPEEYAYIKNDIQIIAEALLIQFKQGLDRMTAGSDSLKGFKDIITTKKFKKVFPTLSLGLDKEVRYAYRGGFTWLNDRFKEKEIGEGMVFDVNSAYPAQMYSRLLPYGEPIVFEGKYVWDEDYPLHIQHIRCEFELKEGYIPTIQIKRSRFYKGNEYLKSSGGEIADLWLSNVDLELMKEHYDLYNVEYISGLKFKATTGLFKDFIDKWTYIKTTSYGAIKQLAKLMLNSLYGKFASNPDVTGKVPYLKENGALGFRLGEEETKDPVYTPMGVFITAWARYTTITAAQACYDRIIYCDTDSIHLTGTEIPDVIKDIVDPKKLGYWEHESTFKRAKYLRQKTYIQDIYMKEVKGYLVEGSPDDYTDIKFSVKCAGMTDKIKKEVTFENFKVGFSRKMKPKPVQVPGGVVLVDDTFTIK

SEQ ID NO: 130 - protein, 575 aa, Artificial; identical to SEQ ID NO: 117
  mutant recombinant phi29-type DNA polymerase

SEQ ID NO: 131 - protein, 575 aa, Artificial; identical to SEQ ID NO: 117
  mutant recombinant phi29-type DNA polymerase

SEQ ID NO: 132 - protein, 575 aa, Artificial
  mutant recombinant phi29-type DNA polymerase
MKHMPRKMYSCDFETTTKVEDCRVWAYGYMNIEDHSEYKIGNSLDEFMAWVLKVQADLYFHNLKFDGAFIINWLERNGFKWSADGLPNTYNTIISRMGQWYMIDICLGYKGKRKIHTVIYDSLKKLPFPVKKIAKDFKLTVLKGDIDYHKERPVGYKITPEEYAYIKNDIQIIAEALLIQFKQGLDRMTAGSDSLKGFKDIITTKKFKKVFPTLSLGLDKEVRYAYRGGFTWLNDRFKEKEIGEGMVFDVNSAYPAQMYSRLLPYGEPIVFEGKYVWDEDYPLHIQHIRCEFELKEGYIPTIQIKRSRFYKGNEYLKSSGGEIADLWLSNVDLELMKEHYDLYNVEYISGLKFKATTGLFKDFIDKWTYIKTTSYGAIKQLAKLMLNSLYGKFASNPDVTGKVPYLKENGALGFRLGEEETKDPVYTPMGVFITAWARYTTITAAQACYDRIIYCDTDSIHLTGTEIPDVIKDIVDPKKLGYWEHESTFKRAKYLRQKTYIQDIYMKRVDGYLVEGSPDDYTDIKFSVKCAGMTDKIKKEVTFENFKVGFSRKMKPKPVQVPGGVVLVDDTFTIK

SEQ ID NO: 133 - protein, 627 aa, Artificial; identical to SEQ ID NO: 90
  mutant recombinant phi29-type DNA polymerase

SEQ ID NO: 134 - protein, 627 aa, Artificial
  mutant recombinant phi29-type DNA polymerase
MSVDGLNDFFEAQKIEWHEAMGHHHHHHHHHHSSGHIEGRHMKHMPRKMYSCDFETTTKVEDCRVWAYGYMNIEDHSEYKIGNSLDEFMAWVLKVQADLYFHNLKFDGAFIINWLERNGFKWSADGLPNTYNTIISRMGQWYMIDICLGYKGKRKIHTVIYDSLKKLPFPVKKIAKDFKLTVLKGDIDYHKERPVGYKITPEEYAYIKNDIQIIAEALLIQFKQGLDRMTAGSDSLKGFKDIITTKKFKKVFPTLSLGLDKEVRYAYRGGFTWLNDRFKEKEIGEGMVFDVNSAYPAQMYSRLLPYGEPIVFEGKYVWDEDYPLHIQHIRCEFELKEGYIPTIQIKRSRFYKGNEYLKSSGGEIADLWLSNVDLELMKEHYDLYNVEYISGLKFKATTGLFKDFIDKWTYIKTTSYGAIKQLAKLMLNSLYGKFASNPDVTGKVPYLKENGALGFRLGEEETKDPVYTPMGVFITAWARYTTITAAQACYDRIIYCDTDSIHLTGTEIPDVIKDIVDPKKLGYWEHESTFKRAKYLRQKTYIQDIYMKEVKGYLVEGSPDDYTDIKFSVKCAGMTDKIKKEVTFENFKVGFSRKMKPKPVQVPGGVVLVDDTFTIKGHHHHHHHHHH

SEQ ID NO: 135 - protein, 627 aa, Artificial
  mutant recombinant phi29-type DNA polymerase
MSVDGLNDFFEAQKIEWHEAMGHHHHHHHHHHSSGHIEGRHMKHMPRKMYSCDFETTTKVEDCRVWAYGYMNIEDHSEYKIGNSLDEFMAWVLKVQADLYFHNLKFDGAFIINWLERNGFKWSADGLPNTYNTIISRMGQWYMIDICLGYKGKRKIHTVIYDSLKKLPFPVKKIAKDFKLTVLKGDIDIHKERPVGYKITPEEYAYIKNDIQIIAEALLIQFKQGLDRMTAGSDSLKGFKDIITTKKFKKVFPTLSLGLDKEVRKAYRGGFTWLNDRFKGKEIGEGMVFDINSAYPAQMYSRLLPYGEPIVFEGKYVWDEDYPLHIQHIRCEFELKEGYIPTIQIKRSRFYKGNEYLKSSGGEIADLWLSNVDLELMKEHYDLYNVEYISGLKFKATTGLFKDFIDKWTYIKTTSYGAIKQLAKLMLNSLYGKFASNPDVTGKVPYLKENGALGFRLGEEETKDPVYTPMGVFITAWARYTTITAAQACYDRIIYCDTDSIHLTGTEIPDVIKDIVDPKKLGYWEHESTFKRAKYLRQKTYIQDIYMKEVKGYLVEGSPDDYTDIKFSVKCAGMTDKIKKEVTFENFKVGFSRKMKPKPVQVPGGVVLVDDTFTIKGHHHHHHHHHH

SEQ ID NO: 136 - protein, 627 aa, Artificial
  mutant recombinant phi29-type DNA polymerase
MSVDGLNDFFEAQKIEWHEAMGHHHHHHHHHHSSGHIEGRHMKHMPRKMYSCDFETTTKVEDCRVWAYGYMNIEDHSEYKIGNSLDEFMAWVLKVQADLYFHNLKFDGAFIINWLERNGFKWSADGLPNTYNTIISRMGQWYMIDICLGYKGKRKIHTVIYDSLKKLPFPVKKIAKDFKLTVLKGDIDIHKERPVGYKITPEEYAYIKNDIQIIAEALLIQFKQGLDRMTAGSDSLKGFKDIITTKKFKKVFPTLSLGLDKEVRKAYRGGFTWLNDRFKGKEIGEGMVFDINSAYPAQMYSRLLPYGEPIVFEGKYVWDEDYPLHIQHIRCEFELKEGYIPTIQIKRSRFYKGNEYLKSSGGEIADLWLSNVDLELMKEHYDLYNVEYISGLKFKATTGLFKDFIDKWTYIKTTSYGAIKQLAKLMLNSLYGKFASNPDVTGKVPYLKENGALGFRLGEEETKDPVYTPMGVFITAWARYTTITAAQACYDRIIYCDTDSIHLTGTEIPDVIKDIVDPKKLGYWEHESTFKRAKYLRQKTYIQDIYMKEVKGYLVQGSPDDYTDIKFSVKCAGMTDKIKKEVTFENFKVGFSRKMKPKPVQVPGGVVLVDDTFTIKGHHHHHHHHHH

SEQ ID NO: 137 - protein, 627 aa, Artificial
  mutant recombinant phi29-type DNA polymerase
MSVDGLNDFFEAQKIEWHEAMGHHHHHHHHHHSSGHIEGRHMKHMPRKMYSCDFETTTKVEDCRVWAYGYMNIEDHSEYKIGNSLDEFMAWVLKVQADLYFHNLKFDGAFIINWLERNGFKWSADGLPNTYNTIISRMGQWYMIDICLGYKGKRKIHTVIYDSLKKLPFPVKKIAKDFKLTVLKGDIDYHKERPVGYKITPEEYAYIKNDIQIIAEALLIQFKQGLDRMTAGSDSLKGFKDIITTKKFKKVFPTLSLGLDKEVRYAYRGGFTWLNDRFKGKEIGEGMVFDVNSAYPAQMYSRLLPYGEPIVFEGKYVWDEDYPLHIQHIRCEFELKEGYIPTIQIKRSRFYKGNEYLKSSGGEIADLWLSNVDLELMKEHYDLYNVEYISGLKFKATTGLFKDFIDKWTYIKTTSYGAIKQLAKLMLNSLYGKFASNPDVTGKVPYLKENGALGFRLGEEETKDPVYTPMGVFITAWARYTTITAAQACYDRIIYCDTDSIHLTGTEIPDVIKDIVDPKKLGYWEHESTFKRAKYLRQKTYIQDIYMKEVKGYLVEGSPDDYTDIKFSVKCAGMTDKIKKEVTFENFKVGFSRKMKPKPVQVPGGVVLVDDTFTIKGHHHHHHHHHH

SEQ ID NO: 138 - protein, 627 aa, Artificial
  mutant recombinant phi29-type DNA polymerase
MSVDGLNDFFEAQKIEWHEAMGHHHHHHHHHHSSGHIEGRHMKHMPRKMYSCDFETTTKVEDCRVWAYGYMNIEDHSEYKIGNSLDEFMAWVLKVQADLYFHNLKFDGAFIINWLERNGFKWSADGLPNTYNTIISRMGQWYMIDICLGYKGKRKIHTVIYDSLKKLPFPVKKIAKDFKLTVLKGDIDYHKERPVGYKITPEEYAYIKNDIQIIAEALLIQFKQGLDRMTAGSDSLKGFKDIITTKKFKKVFPTLSLGLDKEVRKAYRGGFTWLNDRFKGKEIGEGMVFDVNSAYPAQMYSRLLPYGEPIVFEGKYVWDEDYPLHIQHIRCEFELKEGYIPTIQIKRSRFYKGNEYLKSSGGEIADLWLSNVDLELMKEHYDLYNVEYISGLKFKATTGLFKDFIDKWTYIKTTSYGAIKQLAKLMLNSLYGKFASNPDVTGKVPYLKENGALGFRLGEEETKDPVYTPMGVFITAWARYTTITAAQACYDRIIYCDTDSIHLTGTEIPDVIKDIVDPKKLGYWEHESTFKRAKYLRQKTYIQDIYMKEVKGYLVEGSPDDYTDIKFSVKCAGMTDKIKKEVTFENFKVGFSRKMKPKPVQVPGGVVLVDDTFTIKGHHHHHHHHHH

SEQ ID NO: 139 - protein, 627 aa, Artificial
  mutant recombinant phi29-type DNA polymerase
MSVDGLNDFFEAQKIEWHEAMGHHHHHHHHHHSSGHIEGRHMKHMPRKMYSCDFETTTKVEDCRVWAYGYMNIEDHSEYKIGNSLDEFMAWVLKVQADLYFHNLKFDGAFIINWLERNGFKWSADGLPNTYNTIISRMGQWYMIDICLGYKGKRKIHTVIYDSLKKLPFPVKKIAKDFKLTVLKGDIDIHKERPVGYKITPEEYAYIKNDIQIIAEALLIQFKQGLDRMTAGSDSLKGFKDIITTKKFKKVFPTLSLGLDKEVRKAYRGGFTWLNDRFKGKEIGEGMVFDVNSCYPAQMYSRLLPYGEPIVFEGKYVWDEDYPLHIQHIRCEFELKEGYIPTIQIKRSRFYKGNEYLKSSGGEIADLWLSNVDLELMKEHYDLYNVEYISGLKFKATTGLFKDFIDKWTYIKTTSYGAIKQLAKLMLNSLYGKFASNPDVTGKVPYLKENGALGFRLGEEETKDPVYTPMGVFITAWARYTTITAAQACYDRIIYCDTDSIHLTGTEIPDVIKDIVDPKKLGYWEHESTFKRAKYLRQKTYIQDIYMKEVKGYLVEGSPDDYTDIKFSVKCAGMTDKIKKEVTFENFKVGFSRKMKPKPVQVPGGVVLVDDTFTIKGHHHHHHHHHH

SEQ ID NO: 140 - protein, 616 aa, Artificial
  mutant recombinant phi29-type DNA polymerase
MSVDGLNDIFEAQKIEWHEAMGHHHHHHHHHHSSGHIEGRHMKHMPRKMYSCDFETTTKVEDCRVWAYGYMNIEDHSEYKIGNSLDEFMAWVLKVQADLYFHDLKFDGAFIINWLERNGFKWSADGLPNTYNTIISRMGQWYMIDICLGYKGKRKIHTVIYDSLKKLPFPVKKIAKDFKLTVLKGDIDYHKERPVGYKITPEEYAYIKNDIQIIAEALLIQFKQGLDRMTAGSDSLKGFKDIITTKKFKKVFPTLSLGLDKEVRYAYRGGFTWLNDRFKEKEIGEGMVFDINSAYPAQMYSRLLPYGEPIVFEGKYVWDEDYPLHIQHIRCEFELKEGYIPTIQIKRSRFYKGNEYLKSSGGEIADLWLSNVDLELMKEHYDLYNVEYISGLKFKATTGLFKDFIDKWTYIKTTSYGAIKQLAKLMLNSLYGKFASNPDVTGKVPYLKENGALGFRLGEEETKDPVYTPMGVFITAWARYTTITAAQACYDRIIYCDTDSIHLTGTEIPDVIKDIVDPKKLGYWEHESTFKRAKYLRQKTYIQDIYMKEVDGYLVEGSPDDYTDIKFSVKCAGMTDKIKKEVTFENFKVGFSRKMKPKPVQVPGGVVLVDDTFTIK

SEQ ID NO: 141 - protein, 627 aa, Artificial
  mutant recombinant phi29-type DNA polymerase
MSVDGLNDFFEAQKIEWHEAMGHHHHHHHHHHSSGHIEGRHMKHMPRKMYSCDFETTTKVEDCRVWAYGYMNIEDHSEYKIGNSLDEFMAWVLKVQADLYFHNLKFDGAFIINWLERNGFKWSADGLPNTYNTIISRMGQWYMIDICLGYKGKRKIHTVIYDSLKKLPFPVKKIAKDFKLTVLKGDIDYHKERPVGYKITPEEYAYIKNDIQIIAEALLIQFKQGLDRMTAGSDSLKGFKDIITTKKFKKVFPTLSLGLDKEVRKAYRGGFTWLNDRFKGKEIGEGMVFDVNSAYPAQMYSRLLPYGEPIVFEGKYVWDEDYPLHIQHIRCEFELKEGYIPTIQIKRSRFYKGNEYLKSSGGEIADLWLSNVDLELMKEHYDLYNVEYISGLKFKATTGLFKDFIDKWTYIKTTSYGAIKQLAKLMLNSLYGKFASNPDVTGKVPYLKENGALGFRLGEEETKDPVYTPMGVFITAWARYTTITAAQACYDRIIYCDTDSIHLTGTEIPDVIKDIVDPKKLGYWEHESTFKRAKYLRQKTYIQDIYMKEVDGYLVEGSPDDYTDIKLSVKCAGMTDKIKKEVTFENFKVGFSRKMKPKPVQVPGGVVLVDDTFTIKGHHHHHHHHHH

SEQ ID NO: 142 - protein, 627 aa, Artificial
  mutant recombinant phi29-type DNA polymerase
MSVDGLNDIFEAQKIEWHEAMGHHHHHHHHHHSSGHIEGRHMKHMPRKMYSCDFETTTKVEDCRVWAYGYMNIEDHSEYKIGNSLDEFMAWVLKVQADLYFHNLKFDGAFIINWLERNGFKWSADGLPNTYNTIISRMGQWYMIDICLGYKGKRKIHTVIYDSLKKLPFPVKKIAKDFKLTVLKGDIDYHKERPVGYKITPEEYAYIKNDIQIIAEALLIQFKQGLDRMTAGSDSLKGFKDIITTKKFKKVFPTLSLGLDKEVRYAYRGGFTWLNDRFKEKEIGEGMVFDVNSAYPAQMYSRLLPYGEPIVFEGKYVWDEDYPLHIQHIRCEFELKEGYIPTIQIKRSRFYKGNEYLKSSGGEIADLWLSNVDLELMKEHYDLYNVEYISGLKFKATTGLFKDFIDKWTYIKTTSYGAIKQLAKLMLNSLYGKFASNPDVTGKVPYLKENGALGFRLGEEETKDPVYTPMGVFITAWARYTTITAAQACYDRIIYCDTDSIHLTGTEIPDVIKDIVDPKKLGYWEHESTFKRAKYLRQKTYIQDIYMKEVDGYLVKGSPDDYTDIKFSVKCAGMTDKIKKEVTFENFKVGFSRKMKPKPVQVPGGVVLVDDTFTIKGHHHHHHHHHH

SEQ ID NO: 143 - protein, 627 aa, Artificial
  mutant recombinant phi29-type DNA polymerase
MSVDGLNDFFEAQKIEWHEAMGHHHHHHHHHHSSGHIEGRHMKHMPRKMYSCDFETTTKVEDCRVWAYGYMNIEDHSEYKIGNSLDEFMAWVLKVQADLYFHNLKFDGAFIINWLERNGFKWSADGLPNTYNTIISRMGQWYMIDICLGYKGKRKIHTVIYDSLKKLPFPVKKIAKDFKLTVLKGDIDYHKERPVGYKITPEEYAYIKNDIQIIAEALLIQFKQGLDRMTAGSDSLKGFKDIITTKKFKKVFPTLSLGLDKEVRYAYRGGFTWLNDRFKGKEIGEGMVFDVNSAYPAQMYSRLLPYGEPIVFEGKYVWDEDYPLHIQHIRCEFELKEGYIPTIQIKRSRFYKGNEYLKSSGGEIADLWLSNVDLELMKEHYDLYNVEYISGLKFKATTGLFKDFIDKWTYIKTTSYGAIKQLAKLMLNSLYGKFASNPDVTGKVPYLKENGALGFRLGEEETKDPVYTPMGVFITAWARYTTITAAQACYDRIIYCDTDSIHLTGTEIPDVIKDIVDPKKLGYWEHESTFKRAKYLRQKTYIQDIYMKRVDGYLVEGSPDDYTDIKFSVKCAGMTDKIKKEVTFENFKVGFSRKMKPKPVQVPGGVVLVDDTFTIKGHHHHHHHHHH

SEQ ID NO: 144 - protein, 627 aa, Artificial
  mutant recombinant phi29-type DNA polymerase
MSVDGLNDIFEAQKIEWHEAMGHHHHHHHHHHSSGHIEGRHMKHMPRKMYSCDFETTTKVEDCRVWAYGYMNIEDHSEYKIGNSLDEFMAWVLKVQADLYFHNLKFDGAFIINWLERNGFKWSADGLPNTYNTIISRMGQWYMIDICLGYKGKRKIHTVIYDSLKKLPFPVKKIAKDFKLTVLKGDIDIHKERPVGYKITPEEYAYIKNDIQIIAEALLIQFKQGLDRMTAGSDSLKGFKDIITTKKFKKVFPTLSLGLDKEVRYAYRGGFTWLNDRFKEKEIGEGMVFDVNSAYPAQMYSRLLPYGEPIVFEGKYVWDEDYPLHIQHIRCEFELKEGYIPTIQIKRSRFYKGNEYLKSSGGEIADLWLSNVDLELMKEHYDLYNVEYISGLKFKATTGLFKDFIDKWTYIKTTSYGAIKQLAKLMLNSLYGKFASNPDVTGKVPYLKENGALGFRLGEEETKDPVYTPMGVFITAWARYTTITAAQACYDRIIYCDTDSIHLTGTEIPDVIKDIVDPKKLGYWEHESTFKRAKYLRQKTYIQDIYMKEVDGYLVEGSPDDYTDIKFSVKCAGMTDKIKKEVTFENFKVGFSRKMKPKPVQVPGGVVLVDDTFTIKGHHHHHHHHHH

SEQ ID NO: 145 - protein, 627 aa, Artificial
  mutant recombinant phi29-type DNA polymerase
MSVDGLNDFFEAQKIEWHEAMGHHHHHHHHHHSSGHIEGRHMKHMPRKMYSCDFETTTKVEDCRVWAYGYMNIEDHSEYKIGNSLDEFMAWVLKVQADLYFHNLKFRGAFIINWLERNGFKWSADGLPNTYNTIISRMGQWYMIDICLGYKGKRKIHTVIYDSLKKLPFPVKKIAKDFKLTVLKGDIDIHKERPVGYKITPEEYAYIKNDIQIIAEALLIQFKQGLDRMTAGSDSLKGFKDIITTKKFKKVFPTLSLGLDKEVRKAYRGGFTWLNDRFKGKEIGEGMVFDINSAYPAQMYSRLLPYGEPIVFEGKYVWDEDYPLHIQHIRCEFELKEGYIPTIQIKRSRFYKGNEYLKSSGGEIADLWLSNVDLELMKEHYDLYNVEYISGLKFKATTGLFKDFIDKWTYIKTTSYGAIKQLAKLMLNSLYGKFASNPDVTGKVPYLKENGALGFRLGEEETKDPVYTPMGVFITAWARYTTITAAQACYDRIIYCDTDSIHLTGTEIPDVIKDIVDPKKLGYWEHESTFKRAKYLRQKTYIQDIYMKEVKGYLVEGSPDDYTDIKFSVKCAGMTDKIKKEVTFENFKVGFSRKMKPKPVQVPGGVVLVDDTFTIKGHHHHHHHHHH

SEQ ID NO: 146 - protein, 627 aa, Artificial
  mutant recombinant phi29-type DNA polymerase
MSVDGLNDFFEAQKIEWHEAMGHHHHHHHHHHSSGHIEGRHMKHMPRKMYSCDFETTTKVEDCRVWAYGYMNIEDHSEYKIGNSLDEFMAWVLKVQADLYFHDLKFDGAFIINWLERNGFKWSADGLPNTYNTIISRMGQWYMIDICLGYKGKRKIHTVIYDSLKKLPFPVKKIAKDFKLTVLKGDIDIHKERPVGYKITPEEYAYIKNDIQIIAEALLIQFKQGLDRMTAGSDSLKGFKDIITTKKFKKVFPTLSLGLDKEVRKAYRGGFTWLNDRFKGKEIGEGMVFDINSAYPAQMYSRLLPYGEPIVFEGKYVWDEDYPLHIQHIRCEFELKEGYIPTIQIKRSRFYKGNEYLKSSGGEIADLWLSNVDLELMKEHYDLYNVEYISGLKFKATTGLFKDFIDKWTYIKTTSYGAIKQLAKLMLNSLYGKFASNPDVTGKVPYLKENGALGFRLGEEETKDPVYTPMGVFITAWARYTTITAAQACYDRIIYCDTDSIHLTGTEIPDVIKDIVDPKKLGYWEHESTFKRAKYLRQKTYIQDIYMKEVKGYLVEGSPDDYTDIKFSVKCAGMTDKIKKEVTFENFKVGFSRKMKPKPVQVPGGVVLVDDTFTIKGHHHHHHHHHH

SEQ ID NO: 147 - protein, 627 aa, Artificial
  mutant recombinant phi29-type DNA polymerase
MSVDGLNDFFEAQKIEWHEAMGHHHHHHHHHHSSGHIEGRHMKHMPRKMYSCDFETTTKVEDCRVWAYGYMNIEDHSEYKIGNSLDEFMAWVLKVQADLYFHNLKFDGAFIINWLERNGFKWSADGLPNTYNTIISRMGQWYMIDICLGYKGKRKIHTVIYDSLKKLPFPVKKIAKDFKLTVLRGDIDIHKERPVGYKITPEEYAYIKNDIQIIAEALLIQFKQGLDRMTAGSDSLKGFKDIITTKKFKKVFPTLSLGLDKEVRKAYRGGFTWLNDRFKGKEIGEGMVFDINSAYPAQMYSRLLPYGEPIVFEGKYVWDEDYPLHIQHIRCEFELKEGYIPTIQIKRSRFYKGNEYLKSSGGEIADLWLSNVDLELMKEHYDLYNVEYISGLKFKATTGLFKDFIDKWTYIKTTSYGAIKQLAKLMLNSLYGKFASNPDVTGKVPYLKENGALGFRLGEEETKDPVYTPMGVFITAWARYTTITAAQACYDRIIYCDTDSIHLTGTEIPDVIKDIVDPKKLGYWEHESTFKRAKYLRQKTYIQDIYMKEVKGYLVEGSPDDYTDIKFSVKCAGMTDKIKKEVTFENFKVGFSRKMKPKPVQVPGGVVLVDDTFTIKGHHHHHHHHHH

SEQ ID NO: 148 - protein, 627 aa, Artificial
  mutant recombinant phi29-type DNA polymerase
MSVDGLNDFFEAQKIEWHEAMGHHHHHHHHHHSSGHIEGRHMKHMPRKMYSCNFETTTKVEDCRVWAYGYMNIEDHSEYKIGNSLDEFMAWVLKVQADLYFHNLKFDGAFIINWLERNGFKWSADGLPNTYNTIISRMGQWYMIDICLGYKGKRKIHTVIYDSLKKLPFPVKKIAKDFKLTVLKGDIDYHKERPVGYKITPEEYAYIKNDIQIIAEALLIQFKQGLDRMTAGSDSLKGFKDIITTKKFKKVFPTLSLGLDKEVRKAYRGGFTWLNDRFKGKEIGEGMVFDVNSAYPAQMYSRLLPYGEPIVFEGKYVWDEDYPLHIQHIRCEFELKEGYIPTIQIKRSRFYKGNEYLKSSGGEIADLWLSNVDLELMKEHYDLYNVEYISGLKFKATTGLFKDFIDKWTYIKTTSYGAIKQLAKLMLNSLYGKFASNPDVTGKVPYLKENGALGFRLGEEETKDPVYTPMGVFITAWARYTTITAAQACYDRIIYCDTDSIHLTGTEIPDVIKDIVDPKKLGYWEHESTFKRAKYLRQKTYIQDIYMKEVDGYLVEGSPDDYTDIKFSVKCAGMTDKIKKEVTFENFKVGFSRKMKPKPVQVPGGVVLVDDTFTIKGHHHHHHHHHH

SEQ ID NO: 149 - protein, 627 aa, Artificial
  mutant recombinant phi29-type DNA polymerase
MSVDGLNDFFEAQKIEWHEAMGHHHHHHHHHHSSGHIEGRHMKHMPRKMYSCDFETTTKVEDCRVWAYGYMNIEDHSEYKIGNSLDEFMAWVLKVQADLYFHNLKFDGAFIINWLERNGFKWSADGLPNTYNTIISRMGQWYMIDICLGYKGKRKIHTVIYDSLKKLPFPVKKIAKDFKLTVLKGDIDFHKERPVGYKITPEEYAYIKNDIQIIAEALLIQFKQGLDRMTAGSDSLKGFKDIITTKKFKKVFPTLSLGLDKEVRKAYRGGFTWLNDRFKGKEIGEGMVFDINSAYPAQMYSRLLPYGEPIVFEGKYVWDEDYPLHIQHIRCEFELKEGYIPTIQIKRSRFYKGNEYLKSSGGEIADLWLSNVDLELMKEHYDLYNVEYISGLKFKATTGLFKDFIDKWTYIKTTSYGAIKQLAKLMLNSLYGKFASNPDVTGKVPYLKENGALGFRLGEEETKDPVYTPMGVFITAWARYTTITAAQACYDRIIYCDTDSIHLTGTEIPDVIKDIVDPKKLGYWEHESTFKRAKYLRQKTYIQDIYMKEVKGYLVEGSPDDYTDIKFSVKCAGMTDKIKKEVTFENFKVGFSRKMKPKPVQVPGGVVLVDDTFTIKGHHHHHHHHHH

SEQ ID NO: 150 - protein, 627 aa, Artificial
  mutant recombinant phi29-type DNA polymerase
MSVDGLNDFFEAQKIEWHEAMGHHHHHHHHHHSSGHIEGRHMKHMPRKMYSCDFETTTKVEDCRVWAYGYMNIEDHSEYKIGNSLDEFMAWVLKVQADLYFHNLKFDGAFIINWLERNGFKWSADGLPNTYNTIISRMGQWYMIDICLGYKGKRKIHTVIYDSLKKLPFPVKKIAKDFKLTVLKGDIDIHKERPVGYKITPEEYAYIKNDIQIIAEALLIQFKQGLDRMTAGSDSLKGFKDIITTKKFKKVFPTLSLGLDKEVRKAYRGGFTWLNDRFKGKEIGEGMVFDINSAYPAQMYSRLLPYGEPIVFEGKYVWDEDYPLHIQHIRCEFELKEGYIPTIQIKRSRFYKGNEYLKSSGGEIADLWLSNVDLELMKEHYDLYNVEYISGLKFKATTGLFKDFIDKWTYIKTTSYGAIKQLAKLMLNSLYGKFASNPDVTGKVPYLKENGALGFRLGEEETKDPVYTPMGVFITAWARYTTITAAQACYDRIIYCDTDSIHLTGTEIPDVIKDIVDPKKLGYWEHESTFKRAKYLRQKTYIQDIYMKEVRGYLVEGSPDDYTDIKFSVKCAGMTDKIKKEVTFENFKVGFSRKMKPKPVQVPGGVVLVDDTFTIKGHHHHHHHHHH

SEQ ID NO: 151 - protein, 627 aa, Artificial
  mutant recombinant phi29-type DNA polymerase
MSVDGLNDFFEAQKIEWHEAMGHHHHHHHHHHSSGHIEGRHMKHMPRKMYSCDFETTTKVEDCRVWAYGYMNIEDHSEYKIGNSLDEFMAWVLKVQADLYFHNLKFDGAFIINWLERNGFKWSADGLPNTYNTIISRMGQWYMIDICLGYKGKRKIHTVIYDSLKKLPFPVKKIAKDFKLTVLKGDIDIHKERPVGYKITPEEYAYIKNDIQIIAEALLIQFKQGLDRMTAGSDSLKGFKDIITTKKFKKVFPTLSLGLDKEVRKAYRGGFTWLNDRFKGKEIGEGMVFDINSAYPAQMYSRLLPYGEPIVFEGKYVWDEDYPLHIQHIRCEFELKEGYIPTIQIKRSRFYKGNEYLKSSGGEIADLWLSNVDLELMKEHYDLYNVEYISGLKFKATTGLFKDFIDKWTYIKTTSYGAIKQLAKLMLNSLYGKFASNPDVTGKVPYLKENGALGFRLGEEETKDPVYTPMGVFITAWARYTTITAAQACYDRIIYCDTDSIHLTGTEIPDVIKDIVDPKKLGYWEHESTFKRAKYLRQKTYIQDIYMKEVHGYLVEGSPDDYTDIKFSVKCAGMTDKIKKEVTFENFKVGFSRKMKPKPVQVPGGVVLVDDTFTIKGHHHHHHHHHH

SEQ ID NO: 152 - protein, 627 aa, Artificial
  mutant recombinant phi29-type DNA polymerase
MSVDGLNDFFEAQKIEWHEAMGHHHHHHHHHHSSGHIEGRHMKHMPRKMYSCDFETTTKVEDCRVWAYGYMNIEDHSEYKIGNSLDEFMAWVLKVQADLYFHNLKFDGAFIINWLERNGFKWSADGLPNTYNTIISRMGQWYMIDICLGYKGKRKIHTVIYDSLKKLPFPVKKIAKDFKLTVLKGDIDIHKERPVGYKITPEEYAYIKNDIQIIAEALLIQFKQGLDRMTAGSDSLKGFKDIITTKKFKKVFPTLSLGLDKEVRKAYRGGFTWLNDRFKGKEIGEGMVFDINSAYPAQMYSRLLPYGEPIVFEGKYVWDEDYPLHIQHIRCEFELKEGYIPTIQIKRSRFYKGNEYLKSSGGEIADLWLSNVDLELMKEHYDLYNVEYISGLKFKATTGLFKDFIDKWTYIKTTSYGAIKQLAKLMLNSLYGKFASNPDVTGKVPYLKENGALGFRLGEEETKDPVYTPMGVFITAWARYTTITAAQACYDRIIYCDTDSIHLTGTEIPDVIKDIVDPKKLGYWEHESTFKRAKYLRQKTYIQDIYMKKVKGYLVEGSPDDYTDIKFSVKCAGMTDKIKKEVTFENFKVGFSRKMKPKPVQVPGGVVLVDDTFTIKGHHHHHHHHHH

SEQ ID NO: 153 - protein, 586 aa, Artificial
  mutant recombinant phi29-type DNA polymerase
MKHMPRKMYSCDFETTTKVEDCRVWAYGYMNIEDHSEYKIGNSLDEFMAWVLKVQADLYFHNLKFDGAFIINWLERNGFKWSADGLPNTYNTIISRMGQWYMIDICLGYKGKRKIHTVIYDSLKKLPFPVKKIAKDFKLTVLKGDIDYHKERPVGYKITPEEYAYIKNDIQIIAEALLIQFKQGLDRMTAGSDSLKGFKDIITTKKFKKVFPTLSLGLDKEVRYAYRGGFTWLNDRFKEKEIGEGMVFDVNSAYPAQMYSRLLPYGEPIVFEGKYVWDEDYPLHIQHIRCEFELKEGYIPTIQIKRSRFYKGNEYLKSSGGEIADLWLSNVDLELMKEHYDLYNVEYISGLKFKATTGLFKDFIDKWTYIKTTSYGAIKQLAKLMLNSLYGKFASNPDVTGKVPYLKENGALGFRLGEEETKDPVYTPMGVFITAWARYTTITAAQACYDRIIYCDTDSIHLTGTEIPDVIKDIVDPKKLGYWEHESTFKRAKYLRQKTYIQDIYMKEVDGYLVEGSPDDYTDIKFSVKCAGMTDKIKKEVTFENFKVGFSRKMKPKPVQVPGGVVLVDDTFTIKGHHHHHHHHHH

SEQ ID NO: 154 - protein, 586 aa, Artificial
  mutant recombinant phi29-type DNA polymerase
MKHMPRKMYSCDFETTTKVEDCRVWAYGYMNIEDHSEYKIGNSLDEFMAWVLKVQADLYFHNLKFDGAFIINWLERNGFKWSADGLPNTYNTIISRMGQWYMIDICLGYKGKRKIHTVIYDSLKKLPFPVKKIAKDFKLTVLKGDIDYHKERPVGYKITPEEYAYIKNDIQIIAEALLIQFKQGLDRMTAGSDSLKGFKDIITTKKFKKVFPTLSLGLDKEVRYAYRGGFTWLNDRFKEKEIGEGMVFDVNSAYPAQMYSRLLPYGEPIVFEGKYVWDEDYPLHIQHIRCEFELKEGYIPTIQIKRSRFYKGNEYLKSSGGEIADLWLSNVDLELMKEHYDLYNVEYISGLKFKATTGLFKDFIDKWTYIKTTSYGAIKQLAKLMLNSLYGKFASNPDVTGKVPYLKENGALGFRLGEEETKDPVYTPMGVFITAWARYTTITAAQACYDRIIYCDTDSIHLTGTEIPDVIKDIVDPKKLGYWEHESTFKRAKYLRQKTYIQDIYMKEVKGYLVEGSPDDYTDIKFSVKCAGMTDKIKKEVTFENFKVGFSRKMKPKPVQVPGGVVLVDDTFTIKGHHHHHHHHHH

SEQ ID NO: 155 - protein, 586 aa, Artificial
  mutant recombinant phi29-type DNA polymerase
MKHMPRKMYSCDFETTTKVEDCRVWAYGYMNIEDHSEYKIGNSLDEFMAWVLKVQADLYFHNLKFDGAFIINWLERNGFKWSADGLPNTYNTIISRMGQWYMIDICLGYKGKRKIHTVIYDSLKKLPFPVKKIAKDFKLTVLKGDIDIHKERPVGYKITPEEYAYIKNDIQIIAEALLIQFKQGLDRMTAGSDSLKGFKDIITTKKFKKVFPTLSLGLDKEVRKAYRGGFTWLNDRFKGKEIGEGMVFDINSAYPAQMYSRLLPYGEPIVFEGKYVWDEDYPLHIQHIRCEFELKEGYIPTIQIKRSRFYKGNEYLKSSGGEIADLWLSNVDLELMKEHYDLYNVEYISGLKFKATTGLFKDFIDKWTYIKTTSYGAIKQLAKLMLNSLYGKFASNPDVTGKVPYLKENGALGFRLGEEETKDPVYTPMGVFITAWARYTTITAAQACYDRIIYCDTDSIHLTGTEIPDVIKDIVDPKKLGYWEHESTFKRAKYLRQKTYIQDIYMKEVKGYLVEGSPDDYTDIKFSVKCAGMTDKIKKEVTFENFKVGFSRKMKPKPVQVPGGVVLVDDTFTIKGHHHHHHHHHH

SEQ ID NO: 156 - protein, 586 aa, Artificial
  mutant recombinant phi29-type DNA polymerase
MKHMPRKMYSCDFETTTKVEDCRVWAYGYMNIEDHSEYKIGNSLDEFMAWVLKVQADLYFHNLKFDGAFIINWLERNGFKWSADGLPNTYNTIISRMGQWYMIDICLGYKGKRKIHTVIYDSLKKLPFPVKKIAKDFKLTVLKGDIDIHKERPVGYKITPEEYAYIKNDIQIIAEALLIQFKQGLDRMTAGSDSLKGFKDIITTKKFKKVFPTLSLGLDKEVRKAYRGGFTWLNDRFKGKEIGEGMVFDINSAYPAQMYSRLLPYGEPIVFEGKYVWDEDYPLHIQHIRCEFELKEGYIPTIQIKRSRFYKGNEYLKSSGGEIADLWLSNVDLELMKEHYDLYNVEYISGLKFKATTGLFKDFIDKWTYIKTTSYGAIKQLAKLMLNSLYGKFASNPDVTGKVPYLKENGALGFRLGEEETKDPVYTPMGVFITAWARYTTITAAQACYDRIIYCDTDSIHLTGTEIPDVIKDIVDPKKLGYWEHESTFKRAKYLRQKTYIQDIYMKEVKGYLVQGSPDDYTDIKFSVKCAGMTDKIKKEVTFENFKVGFSRKMKPKPVQVPGGVVLVDDTFTIKGHHHHHHHHHH

SEQ ID NO: 157 - protein, 586 aa, Artificial
  mutant recombinant phi29-type DNA polymerase
MKHMPRKMYSCDFETTTKVEDCRVWAYGYMNIEDHSEYKIGNSLDEFMAWVLKVQADLYFHNLKFDGAFIINWLERNGFKWSADGLPNTYNTIISRMGQWYMIDICLGYKGKRKIHTVIYDSLKKLPFPVKKIAKDFKLTVLKGDIDYHKERPVGYKITPEEYAYIKNDIQIIAEALLIQFKQGLDRMTAGSDSLKGFKDIITTKKFKKVFPTLSLGLDKEVRYAYRGGFTWLNDRFKGKEIGEGMVFDVNSAYPAQMYSRLLPYGEPIVFEGKYVWDEDYPLHIQHIRCEFELKEGYIPTIQIKRSRFYKGNEYLKSSGGEIADLWLSNVDLELMKEHYDLYNVEYISGLKFKATTGLFKDFIDKWTYIKTTSYGAIKQLAKLMLNSLYGKFASNPDVTGKVPYLKENGALGFRLGEEETKDPVYTPMGVFITAWARYTTITAAQACYDRIIYCDTDSIHLTGTEIPDVIKDIVDPKKLGYWEHESTFKRAKYLRQKTYIQDIYMKEVKGYLVEGSPDDYTDIKFSVKCAGMTDKIKKEVTFENFKVGFSRKMKPKPVQVPGGVVLVDDTFTIKGHHHHHHHHHH

SEQ ID NO: 158 - protein, 586 aa, Artificial
  mutant recombinant phi29-type DNA polymerase
MKHMPRKMYSCDFETTTKVEDCRVWAYGYMNIEDHSEYKIGNSLDEFMAWVLKVQADLYFHNLKFDGAFIINWLERNGFKWSADGLPNTYNTIISRMGQWYMIDICLGYKGKRKIHTVIYDSLKKLPFPVKKIAKDFKLTVLKGDIDYHKERPVGYKITPEEYAYIKNDIQIIAEALLIQFKQGLDRMTAGSDSLKGFKDIITTKKFKKVFPTLSLGLDKEVRKAYRGGFTWLNDRFKGKEIGEGMVFDVNSAYPAQMYSRLLPYGEPIVFEGKYVWDEDYPLHIQHIRCEFELKEGYIPTIQIKRSRFYKGNEYLKSSGGEIADLWLSNVDLELMKEHYDLYNVEYISGLKFKATTGLFKDFIDKWTYIKTTSYGAIKQLAKLMLNSLYGKFASNPDVTGKVPYLKENGALGFRLGEEETKDPVYTPMGVFITAWARYTTITAAQACYDRIIYCDTDSIHLTGTEIPDVIKDIVDPKKLGYWEHESTFKRAKYLRQKTYIQDIYMKEVKGYLVEGSPDDYTDIKFSVKCAGMTDKIKKEVTFENFKVGFSRKMKPKPVQVPGGVVLVDDTFTIKGHHHHHHHHHH

SEQ ID NO: 159 - protein, 586 aa, Artificial
  mutant recombinant phi29-type DNA polymerase
MKHMPRKMYSCDFETTTKVEDCRVWAYGYMNIEDHSEYKIGNSLDEFMAWVLKVQADLYFHNLKFDGAFIINWLERNGFKWSADGLPNTYNTIISRMGQWYMIDICLGYKGKRKIHTVIYDSLKKLPFPVKKIAKDFKLTVLKGDIDIHKERPVGYKITPEEYAYIKNDIQIIAEALLIQFKQGLDRMTAGSDSLKGFKDIITTKKFKKVFPTLSLGLDKEVRKAYRGGFTWLNDRFKGKEIGEGMVFDVNSCYPAQMYSRLLPYGEPIVFEGKYVWDEDYPLHIQHIRCEFELKEGYIPTIQIKRSRFYKGNEYLKSSGGEIADLWLSNVDLELMKEHYDLYNVEYISGLKFKATTGLFKDFIDKWTYIKTTSYGAIKQLAKLMLNSLYGKFASNPDVTGKVPYLKENGALGFRLGEEETKDPVYTPMGVFITAWARYTTITAAQACYDRIIYCDTDSIHLTGTEIPDVIKDIVDPKKLGYWEHESTFKRAKYLRQKTYIQDIYMKEVKGYLVEGSPDDYTDIKFSVKCAGMTDKIKKEVTFENFKVGFSRKMKPKPVQVPGGVVLVDDTFTIKGHHHHHHHHHH

SEQ ID NO: 160 - protein, 586 aa, Artificial
  mutant recombinant phi29-type DNA polymerase
MKHMPRKMYSCDFETTTKVEDCRVWAYGYMNIEDHSEYKIGNSLDEFMAWVLKVQADLYFHNLKFDGAFIINWLERNGFKWSADGLPNTYNTIISRMGQWYMIDICLGYKGKRKIHTVIYDSLKKLPFPVKKIAKDFKLTVLKGDIDYHKERPVGYKITPEEYAYIKNDIQIIAEALLIQFKQGLDRMTAGSDSLKGFKDIITTKKFKKVFPTLSLGLDKEVRKAYRGGFTWLNDRFKGKEIGEGMVFDVNSAYPAQMYSRLLPYGEPIVFEGKYVWDEDYPLHIQHIRCEFELKEGYIPTIQIKRSRFYKGNEYLKSSGGEIADLWLSNVDLELMKEHYDLYNVEYISGLKFKATTGLFKDFIDKWTYIKTTSYGAIKQLAKLMLNSLYGKFASNPDVTGKVPYLKENGALGFRLGEEETKDPVYTPMGVFITAWARYTTITAAQACYDRIIYCDTDSIHLTGTEIPDVIKDIVDPKKLGYWEHESTFKRAKYLRQKTYIQDIYMKEVDGYLVEGSPDDYTDIKLSVKCAGMTDKIKKEVTFENFKVGFSRKMKPKPVQVPGGVVLVDDTFTIKGHHHHHHHHHH

SEQ ID NO: 161 - protein, 586 aa, Artificial
  mutant recombinant phi29-type DNA polymerase
MKHMPRKMYSCDFETTTKVEDCRVWAYGYMNIEDHSEYKIGNSLDEFMAWVLKVQADLYFHNLKFDGAFIINWLERNGFKWSADGLPNTYNTIISRMGQWYMIDICLGYKGKRKIHTVIYDSLKKLPFPVKKIAKDFKLTVLKGDIDYHKERPVGYKITPEEYAYIKNDIQIIAEALLIQFKQGLDRMTAGSDSLKGFKDIITTKKFKKVFPTLSLGLDKEVRYAYRGGFTWLNDRFKEKEIGEGMVFDVNSAYPAQMYSRLLPYGEPIVFEGKYVWDEDYPLHIQHIRCEFELKEGYIPTIQIKRSRFYKGNEYLKSSGGEIADLWLSNVDLELMKEHYDLYNVEYISGLKFKATTGLFKDFIDKWTYIKTTSYGAIKQLAKLMLNSLYGKFASNPDVTGKVPYLKENGALGFRLGEEETKDPVYTPMGVFITAWARYTTITAAQACYDRIIYCDTDSIHLTGTEIPDVIKDIVDPKKLGYWEHESTFKRAKYLRQKTYIQDIYMKEVDGYLVKGSPDDYTDIKFSVKCAGMTDKIKKEVTFENFKVGFSRKMKPKPVQVPGGVVLVDDTFTIKGHHHHHHHHHH

SEQ ID NO: 162 - protein, 586 aa, Artificial
  mutant recombinant phi29-type DNA polymerase
MKHMPRKMYSCDFETTTKVEDCRVWAYGYMNIEDHSEYKIGNSLDEFMAWVLKVQADLYFHNLKFDGAFIINWLERNGFKWSADGLPNTYNTIISRMGQWYMIDICLGYKGKRKIHTVIYDSLKKLPFPVKKIAKDFKLTVLKGDIDYHKERPVGYKITPEEYAYIKNDIQIIAEALLIQFKQGLDRMTAGSDSLKGFKDIITTKKFKKVFPTLSLGLDKEVRYAYRGGFTWLNDRFKGKEIGEGMVFDVNSAYPAQMYSRLLPYGEPIVFEGKYVWDEDYPLHIQHIRCEFELKEGYIPTIQIKRSRFYKGNEYLKSSGGEIADLWLSNVDLELMKEHYDLYNVEYISGLKFKATTGLFKDFIDKWTYIKTTSYGAIKQLAKLMLNSLYGKFASNPDVTGKVPYLKENGALGFRLGEEETKDPVYTPMGVFITAWARYTTITAAQACYDRIIYCDTDSIHLTGTEIPDVIKDIVDPKKLGYWEHESTFKRAKYLRQKTYIQDIYMKRVDGYLVEGSPDDYTDIKFSVKCAGMTDKIKKEVTFENFKVGFSRKMKPKPVQVPGGVVLVDDTFTIKGHHHHHHHHHH

SEQ ID NO: 163 - protein, 586 aa, Artificial
  mutant recombinant phi29-type DNA polymerase
MKHMPRKMYSCDFETTTKVEDCRVWAYGYMNIEDHSEYKIGNSLDEFMAWVLKVQADLYFHNLKFDGAFIINWLERNGFKWSADGLPNTYNTIISRMGQWYMIDICLGYKGKRKIHTVIYDSLKKLPFPVKKIAKDFKLTVLKGDIDIHKERPVGYKITPEEYAYIKNDIQIIAEALLIQFKQGLDRMTAGSDSLKGFKDIITTKKFKKVFPTLSLGLDKEVRYAYRGGFTWLNDRFKEKEIGEGMVFDVNSAYPAQMYSRLLPYGEPIVFEGKYVWDEDYPLHIQHIRCEFELKEGYIPTIQIKRSRFYKGNEYLKSSGGEIADLWLSNVDLELMKEHYDLYNVEYISGLKFKATTGLFKDFIDKWTYIKTTSYGAIKQLAKLMLNSLYGKFASNPDVTGKVPYLKENGALGFRLGEEETKDPVYTPMGVFITAWARYTTITAAQACYDRIIYCDTDSIHLTGTEIPDVIKDIVDPKKLGYWEHESTFKRAKYLRQKTYIQDIYMKEVDGYLVEGSPDDYTDIKFSVKCAGMTDKIKKEVTFENFKVGFSRKMKPKPVQVPGGVVLVDDTFTIKGHHHHHHHHHH

SEQ ID NO: 164 - protein, 586 aa, Artificial
  mutant recombinant phi29-type DNA polymerase
MKHMPRKMYSCDFETTTKVEDCRVWAYGYMNIEDHSEYKIGNSLDEFMAWVLKVQADLYFHNLKFRGAFIINWLERNGFKWSADGLPNTYNTIISRMGQWYMIDICLGYKGKRKIHTVIYDSLKKLPFPVKKIAKDFKLTVLKGDIDIHKERPVGYKITPEEYAYIKNDIQIIAEALLIQFKQGLDRMTAGSDSLKGFKDIITTKKFKKVFPTLSLGLDKEVRKAYRGGFTWLNDRFKGKEIGEGMVFDINSAYPAQMYSRLLPYGEPIVFEGKYVWDEDYPLHIQHIRCEFELKEGYIPTIQIKRSRFYKGNEYLKSSGGEIADLWLSNVDLELMKEHYDLYNVEYISGLKFKATTGLFKDFIDKWTYIKTTSYGAIKQLAKLMLNSLYGKFASNPDVTGKVPYLKENGALGFRLGEEETKDPVYTPMGVFITAWARYTTITAAQACYDRIIYCDTDSIHLTGTEIPDVIKDIVDPKKLGYWEHESTFKRAKYLRQKTYIQDIYMKEVKGYLVEGSPDDYTDIKFSVKCAGMTDKIKKEVTFENFKVGFSRKMKPKPVQVPGGVVLVDDTFTIKGHHHHHHHHHH

SEQ ID NO: 165 - protein, 586 aa, Artificial
  mutant recombinant phi29-type DNA polymerase
MKHMPRKMYSCDFETTTKVEDCRVWAYGYMNIEDHSEYKIGNSLDEFMAWVLKVQADLYFHDLKFDGAFIINWLERNGFKWSADGLPNTYNTIISRMGQWYMIDICLGYKGKRKIHTVIYDSLKKLPFPVKKIAKDFKLTVLKGDIDIHKERPVGYKITPEEYAYIKNDIQIIAEALLIQFKQGLDRMTAGSDSLKGFKDIITTKKFKKVFPTLSLGLDKEVRKAYRGGFTWLNDRFKGKEIGEGMVFDINSAYPAQMYSRLLPYGEPIVFEGKYVWDEDYPLHIQHIRCEFELKEGYIPTIQIKRSRFYKGNEYLKSSGGEIADLWLSNVDLELMKEHYDLYNVEYISGLKFKATTGLFKDFIDKWTYIKTTSYGAIKQLAKLMLNSLYGKFASNPDVTGKVPYLKENGALGFRLGEEETKDPVYTPMGVFITAWARYTTITAAQACYDRIIYCDTDSIHLTGTEIPDVIKDIVDPKKLGYWEHESTFKRAKYLRQKTYIQDIYMKEVKGYLVEGSPDDYTDIKFSVKCAGMTDKIKKEVTFENFKVGFSRKMKPKPVQVPGGVVLVDDTFTIKGHHHHHHHHHH

SEQ ID NO: 166 - protein, 586 aa, Artificial
  mutant recombinant phi29-type DNA polymerase
MKHMPRKMYSCDFETTTKVEDCRVWAYGYMNIEDHSEYKIGNSLDEFMAWVLKVQADLYFHNLKFDGAFIINWLERNGFKWSADGLPNTYNTIISRMGQWYMIDICLGYKGKRKIHTVIYDSLKKLPFPVKKIAKDFKLTVLRGDIDIHKERPVGYKITPEEYAYIKNDIQIIAEALLIQFKQGLDRMTAGSDSLKGFKDIITTKKFKKVFPTLSLGLDKEVRKAYRGGFTWLNDRFKGKEIGEGMVFDINSAYPAQMYSRLLPYGEPIVFEGKYVWDEDYPLHIQHIRCEFELKEGYIPTIQIKRSRFYKGNEYLKSSGGEIADLWLSNVDLELMKEHYDLYNVEYISGLKFKATTGLFKDFIDKWTYIKTTSYGAIKQLAKLMLNSLYGKFASNPDVTGKVPYLKENGALGFRLGEEETKDPVYTPMGVFITAWARYTTITAAQACYDRIIYCDTDSIHLTGTEIPDVIKDIVDPKKLGYWEHESTFKRAKYLRQKTYIQDIYMKEVKGYLVEGSPDDYTDIKFSVKCAGMTDKIKKEVTFENFKVGFSRKMKPKPVQVPGGVVLVDDTFTIKGHHHHHHHHHH

SEQ ID NO: 167 - protein, 586 aa, Artificial
  mutant recombinant phi29-type DNA polymerase
MKHMPRKMYSCNFETTTKVEDCRVWAYGYMNIEDHSEYKIGNSLDEFMAWVLKVQADLYFHNLKFDGAFIINWLERNGFKWSADGLPNTYNTIISRMGQWYMIDICLGYKGKRKIHTVIYDSLKKLPFPVKKIAKDFKLTVLKGDIDYHKERPVGYKITPEEYAYIKNDIQIIAEALLIQFKQGLDRMTAGSDSLKGFKDIITTKKFKKVFPTLSLGLDKEVRKAYRGGFTWLNDRFKGKEIGEGMVFDVNSAYPAQMYSRLLPYGEPIVFEGKYVWDEDYPLHIQHIRCEFELKEGYIPTIQIKRSRFYKGNEYLKSSGGEIADLWLSNVDLELMKEHYDLYNVEYISGLKFKATTGLFKDFIDKWTYIKTTSYGAIKQLAKLMLNSLYGKFASNPDVTGKVPYLKENGALGFRLGEEETKDPVYTPMGVFITAWARYTTITAAQACYDRIIYCDTDSIHLTGTEIPDVIKDIVDPKKLGYWEHESTFKRAKYLRQKTYIQDIYMKEVDGYLVEGSPDDYTDIKFSVKCAGMTDKIKKEVTFENFKVGFSRKMKPKPVQVPGGVVLVDDTFTIKGHHHHHHHHHH

SEQ ID NO: 168 - protein, 586 aa, Artificial
  mutant recombinant phi29-type DNA polymerase
MKHMPRKMYSCDFETTTKVEDCRVWAYGYMNIEDHSEYKIGNSLDEFMAWVLKVQADLYFHNLKFDGAFIINWLERNGFKWSADGLPNTYNTIISRMGQWYMIDICLGYKGKRKIHTVIYDSLKKLPFPVKKIAKDFKLTVLKGDIDFHKERPVGYKITPEEYAYIKNDIQIIAEALLIQFKQGLDRMTAGSDSLKGFKDIITTKKFKKVFPTLSLGLDKEVRKAYRGGFTWLNDRFKGKEIGEGMVFDINSAYPAQMYSRLLPYGEPIVFEGKYVWDEDYPLHIQHIRCEFELKEGYIPTIQIKRSRFYKGNEYLKSSGGEIADLWLSNVDLELMKEHYDLYNVEYISGLKFKATTGLFKDFIDKWTYIKTTSYGAIKQLAKLMLNSLYGKFASNPDVTGKVPYLKENGALGFRLGEEETKDPVYTPMGVFITAWARYTTITAAQACYDRIIYCDTDSIHLTGTEIPDVIKDIVDPKKLGYWEHESTFKRAKYLRQKTYIQDIYMKEVKGYLVEGSPDDYTDIKFSVKCAGMTDKIKKEVTFENFKVGFSRKMKPKPVQVPGGVVLVDDTFTIKGHHHHHHHHHH

SEQ ID NO: 169 - protein, 586 aa, Artificial
  mutant recombinant phi29-type DNA polymerase
MKHMPRKMYSCDFETTTKVEDCRVWAYGYMNIEDHSEYKIGNSLDEFMAWVLKVQADLYFHNLKFDGAFIINWLERNGFKWSADGLPNTYNTIISRMGQWYMIDICLGYKGKRKIHTVIYDSLKKLPFPVKKIAKDFKLTVLKGDIDIHKERPVGYKITPEEYAYIKNDIQIIAEALLIQFKQGLDRMTAGSDSLKGFKDIITTKKFKKVFPTLSLGLDKEVRKAYRGGFTWLNDRFKGKEIGEGMVFDINSAYPAQMYSRLLPYGEPIVFEGKYVWDEDYPLHIQHIRCEFELKEGYIPTIQIKRSRFYKGNEYLKSSGGEIADLWLSNVDLELMKEHYDLYNVEYISGLKFKATTGLFKDFIDKWTYIKTTSYGAIKQLAKLMLNSLYGKFASNPDVTGKVPYLKENGALGFRLGEEETKDPVYTPMGVFITAWARYTTITAAQACYDRIIYCDTDSIHLTGTEIPDVIKDIVDPKKLGYWEHESTFKRAKYLRQKTYIQDIYMKEVRGYLVEGSPDDYTDIKFSVKCAGMTDKIKKEVTFENFKVGFSRKMKPKPVQVPGGVVLVDDTFTIKGHHHHHHHHHH

SEQ ID NO: 170 - protein, 586 aa, Artificial
  mutant recombinant phi29-type DNA polymerase
MKHMPRKMYSCDFETTTKVEDCRVWAYGYMNIEDHSEYKIGNSLDEFMAWVLKVQADLYFHNLKFDGAFIINWLERNGFKWSADGLPNTYNTIISRMGQWYMIDICLGYKGKRKIHTVIYDSLKKLPFPVKKIAKDFKLTVLKGDIDIHKERPVGYKITPEEYAYIKNDIQIIAEALLIQFKQGLDRMTAGSDSLKGFKDIITTKKFKKVFPTLSLGLDKEVRKAYRGGFTWLNDRFKGKEIGEGMVFDINSAYPAQMYSRLLPYGEPIVFEGKYVWDEDYPLHIQHIRCEFELKEGYIPTIQIKRSRFYKGNEYLKSSGGEIADLWLSNVDLELMKEHYDLYNVEYISGLKFKATTGLFKDFIDKWTYIKTTSYGAIKQLAKLMLNSLYGKFASNPDVTGKVPYLKENGALGFRLGEEETKDPVYTPMGVFITAWARYTTITAAQACYDRIIYCDTDSIHLTGTEIPDVIKDIVDPKKLGYWEHESTFKRAKYLRQKTYIQDIYMKEVHGYLVEGSPDDYTDIKFSVKCAGMTDKIKKEVTFENFKVGFSRKMKPKPVQVPGGVVLVDDTFTIKGHHHHHHHHHH

SEQ ID NO: 171 - protein, 586 aa, Artificial
  mutant recombinant phi29-type DNA polymerase
MKHMPRKMYSCDFETTTKVEDCRVWAYGYMNIEDHSEYKIGNSLDEFMAWVLKVQADLYFHNLKFDGAFIINWLERNGFKWSADGLPNTYNTIISRMGQWYMIDICLGYKGKRKIHTVIYDSLKKLPFPVKKIAKDFKLTVLKGDIDIHKERPVGYKITPEEYAYIKNDIQIIAEALLIQFKQGLDRMTAGSDSLKGFKDIITTKKFKKVFPTLSLGLDKEVRKAYRGGFTWLNDRFKGKEIGEGMVFDINSAYPAQMYSRLLPYGEPIVFEGKYVWDEDYPLHIQHIRCEFELKEGYIPTIQIKRSRFYKGNEYLKSSGGEIADLWLSNVDLELMKEHYDLYNVEYISGLKFKATTGLFKDFIDKWTYIKTTSYGAIKQLAKLMLNSLYGKFASNPDVTGKVPYLKENGALGFRLGEEETKDPVYTPMGVFITAWARYTTITAAQACYDRIIYCDTDSIHLTGTEIPDVIKDIVDPKKLGYWEHESTFKRAKYLRQKTYIQDIYMKKVKGYLVEGSPDDYTDIKFSVKCAGMTDKIKKEVTFENFKVGFSRKMKPKPVQVPGGVVLVDDTFTIKGHHHHHHHHHH

SEQ ID NO: 172 - protein, 575 aa, Artificial; identical to SEQ ID NO: 117
  mutant recombinant phi29-type DNA polymerase

SEQ ID NO: 173 - protein, 575 aa, Artificial
  mutant recombinant phi29-type DNA polymerase
MKHMPRKMYSCDFETTTKVEDCRVWAYGYMNIEDHSEYKIGNSLDEFMAWVLKVQADLYFHNLKFDGAFIINWLERNGFKWSADGLPNTYNTIISRMGQWYMIDICLGYKGKRKIHTVIYDSLKKLPFPVKKIAKDFKLTVLKGDIDYHKERPVGYKITPEEYAYIKNDIQIIAEALLIQFKQGLDRMTAGSDSLKGFKDIITTKKFKKVFPTLSLGLDKEVRYAYRGGFTWLNDRFKEKEIGEGMVFDVNSAYPAQMYSRLLPYGEPIVFEGKYVWDEDYPLHIQHIRCEFELKEGYIPTIQIKRSRFYKGNEYLKSSGGEIADLWLSNVDLELMKEHYDLYNVEYISGLKFKATTGLFKDFIDKWTYIKTTSYGAIKQLAKLMLNSLYGKFASNPDVTGKVPYLKENGALGFRLGEEETKDPVYTPMGVFITAWARYTTITAAQACYDRIIYCDTDSIHLTGTEIPDVIKDIVDPKKLGYWEHESTFKRAKYLRQKTYIQDIYMKEVKGYLVEGSPDDYTDIKFSVKCAGMTDKIKKEVTFENFKVGFSRKMKPKPVQVPGGVVLVDDTFTIK

SEQ ID NO: 174 - protein, 575 aa, Artificial
  mutant recombinant phi29-type DNA polymerase
MKHMPRKMYSCDFETTTKVEDCRVWAYGYMNIEDHSEYKIGNSLDEFMAWVLKVQADLYFHNLKFDGAFIINWLERNGFKWSADGLPNTYNTIISRMGQWYMIDICLGYKGKRKIHTVIYDSLKKLPFPVKKIAKDFKLTVLKGDIDIHKERPVGYKITPEEYAYIKNDIQIIAEALLIQFKQGLDRMTAGSDSLKGFKDIITTKKFKKVFPTLSLGLDKEVRKAYRGGFTWLNDRFKGKEIGEGMVFDINSAYPAQMYSRLLPYGEPIVFEGKYVWDEDYPLHIQHIRCEFELKEGYIPTIQIKRSRFYKGNEYLKSSGGEIADLWLSNVDLELMKEHYDLYNVEYISGLKFKATTGLFKDFIDKWTYIKTTSYGAIKQLAKLMLNSLYGKFASNPDVTGKVPYLKENGALGFRLGEEETKDPVYTPMGVFITAWARYTTITAAQACYDRIIYCDTDSIHLTGTEIPDVIKDIVDPKKLGYWEHESTFKRAKYLRQKTYIQDIYMKEVKGYLVEGSPDDYTDIKFSVKCAGMTDKIKKEVTFENFKVGFSRKMKPKPVQVPGGVVLVDDTFTIK

SEQ ID NO: 175 - protein, 575 aa, Artificial
  mutant recombinant phi29-type DNA polymerase
MKHMPRKMYSCDFETTTKVEDCRVWAYGYMNIEDHSEYKIGNSLDEFMAWVLKVQADLYFHNLKFDGAFIINWLERNGFKWSADGLPNTYNTIISRMGQWYMIDICLGYKGKRKIHTVIYDSLKKLPFPVKKIAKDFKLTVLKGDIDIHKERPVGYKITPEEYAYIKNDIQIIAEALLIQFKQGLDRMTAGSDSLKGFKDIITTKKFKKVFPTLSLGLDKEVRKAYRGGFTWLNDRFKGKEIGEGMVFDINSAYPAQMYSRLLPYGEPIVFEGKYVWDEDYPLHIQHIRCEFELKEGYIPTIQIKRSRFYKGNEYLKSSGGEIADLWLSNVDLELMKEHYDLYNVEYISGLKFKATTGLFKDFIDKWTYIKTTSYGAIKQLAKLMLNSLYGKFASNPDVTGKVPYLKENGALGFRLGEEETKDPVYTPMGVFITAWARYTTITAAQACYDRIIYCDTDSIHLTGTEIPDVIKDIVDPKKLGYWEHESTFKRAKYLRQKTYIQDIYMKEVKGYLVQGSPDDYTDIKFSVKCAGMTDKIKKEVTFENFKVGFSRKMKPKPVQVPGGVVLVDDTFTIK

SEQ ID NO: 176 - protein, 575 aa, Artificial
  mutant recombinant phi29-type DNA polymerase
MKHMPRKMYSCDFETTTKVEDCRVWAYGYMNIEDHSEYKIGNSLDEFMAWVLKVQADLYFHNLKFDGAFIINWLERNGFKWSADGLPNTYNTIISRMGQWYMIDICLGYKGKRKIHTVIYDSLKKLPFPVKKIAKDFKLTVLKGDIDYHKERPVGYKITPEEYAYIKNDIQIIAEALLIQFKQGLDRMTAGSDSLKGFKDIITTKKFKKVFPTLSLGLDKEVRYAYRGGFTWLNDRFKGKEIGEGMVFDVNSAYPAQMYSRLLPYGEPIVFEGKYVWDEDYPLHIQHIRCEFELKEGYIPTIQIKRSRFYKGNEYLKSSGGEIADLWLSNVDLELMKEHYDLYNVEYISGLKFKATTGLFKDFIDKWTYIKTTSYGAIKQLAKLMLNSLYGKFASNPDVTGKVPYLKENGALGFRLGEEETKDPVYTPMGVFITAWARYTTITAAQACYDRIIYCDTDSIHLTGTEIPDVIKDIVDPKKLGYWEHESTFKRAKYLRQKTYIQDIYMKEVKGYLVEGSPDDYTDIKFSVKCAGMTDKIKKEVTFENFKVGFSRKMKPKPVQVPGGVVLVDDTFTIK

SEQ ID NO: 177 - protein, 575 aa, Artificial
  mutant recombinant phi29-type DNA polymerase
MKHMPRKMYSCDFETTTKVEDCRVWAYGYMNIEDHSEYKIGNSLDEFMAWVLKVQADLYFHNLKFDGAFIINWLERNGFKWSADGLPNTYNTIISRMGQWYMIDICLGYKGKRKIHTVIYDSLKKLPFPVKKIAKDFKLTVLKGDIDYHKERPVGYKITPEEYAYIKNDIQIIAEALLIQFKQGLDRMTAGSDSLKGFKDIITTKKFKKVFPTLSLGLDKEVRKAYRGGFTWLNDRFKGKEIGEGMVFDVNSAYPAQMYSRLLPYGEPIVFEGKYVWDEDYPLHIQHIRCEFELKEGYIPTIQIKRSRFYKGNEYLKSSGGEIADLWLSNVDLELMKEHYDLYNVEYISGLKFKATTGLFKDFIDKWTYIKTTSYGAIKQLAKLMLNSLYGKFASNPDVTGKVPYLKENGALGFRLGEEETKDPVYTPMGVFITAWARYTTITAAQACYDRIIYCDTDSIHLTGTEIPDVIKDIVDPKKLGYWEHESTFKRAKYLRQKTYIQDIYMKEVKGYLVEGSPDDYTDIKFSVKCAGMTDKIKKEVTFENFKVGFSRKMKPKPVQVPGGVVLVDDTFTIK

SEQ ID NO: 178 - protein, 575 aa, Artificial
  mutant recombinant phi29-type DNA polymerase
MKHMPRKMYSCDFETTTKVEDCRVWAYGYMNIEDHSEYKIGNSLDEFMAWVLKVQADLYFHNLKFDGAFIINWLERNGFKWSADGLPNTYNTIISRMGQWYMIDICLGYKGKRKIHTVIYDSLKKLPFPVKKIAKDFKLTVLKGDIDIHKERPVGYKITPEEYAYIKNDIQIIAEALLIQFKQGLDRMTAGSDSLKGFKDIITTKKFKKVFPTLSLGLDKEVRKAYRGGFTWLNDRFKGKEIGEGMVFDVNSCYPAQMYSRLLPYGEPIVFEGKYVWDEDYPLHIQHIRCEFELKEGYIPTIQIKRSRFYKGNEYLKSSGGEIADLWLSNVDLELMKEHYDLYNVEYISGLKFKATTGLFKDFIDKWTYIKTTSYGAIKQLAKLMLNSLYGKFASNPDVTGKVPYLKENGALGFRLGEEETKDPVYTPMGVFITAWARYTTITAAQACYDRIIYCDTDSIHLTGTEIPDVIKDIVDPKKLGYWEHESTFKRAKYLRQKTYIQDIYMKEVKGYLVEGSPDDYTDIKFSVKCAGMTDKIKKEVTFENFKVGFSRKMKPKPVQVPGGVVLVDDTFTIK

SEQ ID NO: 179 - protein, 575 aa, Artificial
  mutant recombinant phi29-type DNA polymerase
MKHMPRKMYSCDFETTTKVEDCRVWAYGYMNIEDHSEYKIGNSLDEFMAWVLKVQADLYFHDLKFDGAFIINWLERNGFKWSADGLPNTYNTIISRMGQWYMIDICLGYKGKRKIHTVIYDSLKKLPFPVKKIAKDFKLTVLKGDIDYHKERPVGYKITPEEYAYIKNDIQIIAEALLIQFKQGLDRMTAGSDSLKGFKDIITTKKFKKVFPTLSLGLDKEVRYAYRGGFTWLNDRFKEKEIGEGMVFDINSAYPAQMYSRLLPYGEPIVFEGKYVWDEDYPLHIQHIRCEFELKEGYIPTIQIKRSRFYKGNEYLKSSGGEIADLWLSNVDLELMKEHYDLYNVEYISGLKFKATTGLFKDFIDKWTYIKTTSYGAIKQLAKLMLNSLYGKFASNPDVTGKVPYLKENGALGFRLGEEETKDPVYTPMGVFITAWARYTTITAAQACYDRIIYCDTDSIHLTGTEIPDVIKDIVDPKKLGYWEHESTFKRAKYLRQKTYIQDIYMKEVDGYLVEGSPDDYTDIKFSVKCAGMTDKIKKEVTFENFKVGFSRKMKPKPVQVPGGVVLVDDTFTIK

SEQ ID NO: 180 - protein, 575 aa, Artificial
  mutant recombinant phi29-type DNA polymerase
MKHMPRKMYSCDFETTTKVEDCRVWAYGYMNIEDHSEYKIGNSLDEFMAWVLKVQADLYFHNLKFDGAFIINWLERNGFKWSADGLPNTYNTIISRMGQWYMIDICLGYKGKRKIHTVIYDSLKKLPFPVKKIAKDFKLTVLKGDIDYHKERPVGYKITPEEYAYIKNDIQIIAEALLIQFKQGLDRMTAGSDSLKGFKDIITTKKFKKVFPTLSLGLDKEVRKAYRGGFTWLNDRFKGKEIGEGMVFDVNSAYPAQMYSRLLPYGEPIVFEGKYVWDEDYPLHIQHIRCEFELKEGYIPTIQIKRSRFYKGNEYLKSSGGEIADLWLSNVDLELMKEHYDLYNVEYISGLKFKATTGLFKDFIDKWTYIKTTSYGAIKQLAKLMLNSLYGKFASNPDVTGKVPYLKENGALGFRLGEEETKDPVYTPMGVFITAWARYTTITAAQACYDRIIYCDTDSIHLTGTEIPDVIKDIVDPKKLGYWEHESTFKRAKYLRQKTYIQDIYMKEVDGYLVEGSPDDYTDIKLSVKCAGMTDKIKKEVTFENFKVGFSRKMKPKPVQVPGGVVLVDDTFTIK

SEQ ID NO: 181 - protein, 575 aa, Artificial
  mutant recombinant phi29-type DNA polymerase
MKHMPRKMYSCDFETTTKVEDCRVWAYGYMNIEDHSEYKIGNSLDEFMAWVLKVQADLYFHNLKFDGAFIINWLERNGFKWSADGLPNTYNTIISRMGQWYMIDICLGYKGKRKIHTVIYDSLKKLPFPVKKIAKDFKLTVLKGDIDYHKERPVGYKITPEEYAYIKNDIQIIAEALLIQFKQGLDRMTAGSDSLKGFKDIITTKKFKKVFPTLSLGLDKEVRYAYRGGFTWLNDRFKEKEIGEGMVFDVNSAYPAQMYSRLLPYGEPIVFEGKYVWDEDYPLHIQHIRCEFELKEGYIPTIQIKRSRFYKGNEYLKSSGGEIADLWLSNVDLELMKEHYDLYNVEYISGLKFKATTGLFKDFIDKWTYIKTTSYGAIKQLAKLMLNSLYGKFASNPDVTGKVPYLKENGALGFRLGEEETKDPVYTPMGVFITAWARYTTITAAQACYDRIIYCDTDSIHLTGTEIPDVIKDIVDPKKLGYWEHESTFKRAKYLRQKTYIQDIYMKEVDGYLVKGSPDDYTDIKFSVKCAGMTDKIKKEVTFENFKVGFSRKMKPKPVQVPGGVVLVDDTFTIK

SEQ ID NO: 182 - protein, 572 aa, Artificial
  mutant recombinant phi29-type DNA polymerase
MPRKMYSCDFETTTKVEDCRVWAYGYMNIEDHSEYKIGNSLDEFMAWVLKVQADLYFHNLKFDGAFIINWLERNGFKWSADGLPNTYNTIISRMGQWYMIDICLGYKGKRKIHTVIYDSLKKLPFPVKKIAKDFKLTVLKGDIDYHKERPVGYKITPEEYAYIKNDIQIIAEALLIQFKQGLDRMTAGSDSLKGFKDIITTKKFKKVFPTLSLGLDKEVRYAYRGGFTWLNDRFKGKEIGEGMVFDVNSAYPAQMYSRLLPYGEPIVFEGKYVWDEDYPLHIQHIRCEFELKEGYIPTIQIKRSRFYKGNEYLKSSGGEIADLWLSNVDLELMKEHYDLYNVEYISGLKFKATTGLFKDFIDKWTYIKTTSYGAIKQLAKLMLNSLYGKFASNPDVTGKVPYLKENGALGFRLGEEETKDPVYTPMGVFITAWARYTTITAAQACYDRIIYCDTDSIHLTGTEIPDVIKDIVDPKKLGYWEHESTFKRAKYLRQKTYIQDIYMKRVDGYLVEGSPDDYTDIKFSVKCAGMTDKIKKEVTFENFKVGFSRKMKPKPVQVPGGVVLVDDTFTIK

SEQ ID NO: 183 - protein, 575 aa, Artificial
  mutant recombinant phi29-type DNA polymerase
MKHMPRKMYSCDFETTTKVEDCRVWAYGYMNIEDHSEYKIGNSLDEFMAWVLKVQADLYFHNLKFDGAFIINWLERNGFKWSADGLPNTYNTIISRMGQWYMIDICLGYKGKRKIHTVIYDSLKKLPFPVKKIAKDFKLTVLKGDIDIHKERPVGYKITPEEYAYIKNDIQIIAEALLIQFKQGLDRMTAGSDSLKGFKDIITTKKFKKVFPTLSLGLDKEVRYAYRGGFTWLNDRFKEKEIGEGMVFDVNSAYPAQMYSRLLPYGEPIVFEGKYVWDEDYPLHIQHIRCEFELKEGYIPTIQIKRSRFYKGNEYLKSSGGEIADLWLSNVDLELMKEHYDLYNVEYISGLKFKATTGLFKDFIDKWTYIKTTSYGAIKQLAKLMLNSLYGKFASNPDVTGKVPYLKENGALGFRLGEEETKDPVYTPMGVFITAWARYTTITAAQACYDRIIYCDTDSIHLTGTEIPDVIKDIVDPKKLGYWEHESTFKRAKYLRQKTYIQDIYMKEVDGYLVEGSPDDYTDIKFSVKCAGMTDKIKKEVTFENFKVGFSRKMKPKPVQVPGGVVLVDDTFTIK

SEQ ID NO: 184 - protein, 575 aa, Artificial
  mutant recombinant phi29-type DNA polymerase
MKHMPRKMYSCDFETTTKVEDCRVWAYGYMNIEDHSEYKIGNSLDEFMAWVLKVQADLYFHNLKFRGAFIINWLERNGFKWSADGLPNTYNTIISRMGQWYMIDICLGYKGKRKIHTVIYDSLKKLPFPVKKIAKDFKLTVLKGDIDIHKERPVGYKITPEEYAYIKNDIQIIAEALLIQFKQGLDRMTAGSDSLKGFKDIITTKKFKKVFPTLSLGLDKEVRKAYRGGFTWLNDRFKGKEIGEGMVFDINSAYPAQMYSRLLPYGEPIVFEGKYVWDEDYPLHIQHIRCEFELKEGYIPTIQIKRSRFYKGNEYLKSSGGEIADLWLSNVDLELMKEHYDLYNVEYISGLKFKATTGLFKDFIDKWTYIKTTSYGAIKQLAKLMLNSLYGKFASNPDVTGKVPYLKENGALGFRLGEEETKDPVYTPMGVFITAWARYTTITAAQACYDRIIYCDTDSIHLTGTEIPDVIKDIVDPKKLGYWEHESTFKRAKYLRQKTYIQDIYMKEVKGYLVEGSPDDYTDIKFSVKCAGMTDKIKKEVTFENFKVGFSRKMKPKPVQVPGGVVLVDDTFTIK

SEQ ID NO: 185 - protein, 575 aa, Artificial
  mutant recombinant phi29-type DNA polymerase
MKHMPRKMYSCDFETTTKVEDCRVWAYGYMNIEDHSEYKIGNSLDEFMAWVLKVQADLYFHDLKFDGAFIINWLERNGFKWSADGLPNTYNTIISRMGQWYMIDICLGYKGKRKIHTVIYDSLKKLPFPVKKIAKDFKLTVLKGDIDIHKERPVGYKITPEEYAYIKNDIQIIAEALLIQFKQGLDRMTAGSDSLKGFKDIITTKKFKKVFPTLSLGLDKEVRKAYRGGFTWLNDRFKGKEIGEGMVFDINSAYPAQMYSRLLPYGEPIVFEGKYVWDEDYPLHIQHIRCEFELKEGYIPTIQIKRSRFYKGNEYLKSSGGEIADLWLSNVDLELMKEHYDLYNVEYISGLKFKATTGLFKDFIDKWTYIKTTSYGAIKQLAKLMLNSLYGKFASNPDVTGKVPYLKENGALGFRLGEEETKDPVYTPMGVFITAWARYTTITAAQACYDRIIYCDTDSIHLTGTEIPDVIKDIVDPKKLGYWEHESTFKRAKYLRQKTYIQDIYMKEVKGYLVEGSPDDYTDIKFSVKCAGMTDKIKKEVTFENFKVGFSRKMKPKPVQVPGGVVLVDDTFTIK

SEQ ID NO: 186 - protein, 575 aa, Artificial
  mutant recombinant phi29-type DNA polymerase
MKHMPRKMYSCDFETTTKVEDCRVWAYGYMNIEDHSEYKIGNSLDEFMAWVLKVQADLYFHNLKFDGAFIINWLERNGFKWSADGLPNTYNTIISRMGQWYMIDICLGYKGKRKIHTVIYDSLKKLPFPVKKIAKDFKLTVLRGDIDIHKERPVGYKITPEEYAYIKNDIQIIAEALLIQFKQGLDRMTAGSDSLKGFKDIITTKKFKKVFPTLSLGLDKEVRKAYRGGFTWLNDRFKGKEIGEGMVFDINSAYPAQMYSRLLPYGEPIVFEGKYVWDEDYPLHIQHIRCEFELKEGYIPTIQIKRSRFYKGNEYLKSSGGEIADLWLSNVDLELMKEHYDLYNVEYISGLKFKATTGLFKDFIDKWTYIKTTSYGAIKQLAKLMLNSLYGKFASNPDVTGKVPYLKENGALGFRLGEEETKDPVYTPMGVFITAWARYTTITAAQACYDRIIYCDTDSIHLTGTEIPDVIKDIVDPKKLGYWEHESTFKRAKYLRQKTYIQDIYMKEVKGYLVEGSPDDYTDIKFSVKCAGMTDKIKKEVTFENFKVGFSRKMKPKPVQVPGGVVLVDDTFTIK

SEQ ID NO: 187 - protein, 575 aa, Artificial
  mutant recombinant phi29-type DNA polymerase
MKHMPRKMYSCNFETTTKVEDCRVWAYGYMNIEDHSEYKIGNSLDEFMAWVLKVQADLYFHNLKFDGAFIINWLERNGFKWSADGLPNTYNTIISRMGQWYMIDICLGYKGKRKIHTVIYDSLKKLPFPVKKIAKDFKLTVLKGDIDYHKERPVGYKITPEEYAYIKNDIQIIAEALLIQFKQGLDRMTAGSDSLKGFKDIITTKKFKKVFPTLSLGLDKEVRKAYRGGFTWLNDRFKGKEIGEGMVFDVNSAYPAQMYSRLLPYGEPIVFEGKYVWDEDYPLHIQHIRCEFELKEGYIPTIQIKRSRFYKGNEYLKSSGGEIADLWLSNVDLELMKEHYDLYNVEYISGLKFKATTGLFKDFIDKWTYIKTTSYGAIKQLAKLMLNSLYGKFASNPDVTGKVPYLKENGALGFRLGEEETKDPVYTPMGVFITAWARYTTITAAQACYDRIIYCDTDSIHLTGTEIPDVIKDIVDPKKLGYWEHESTFKRAKYLRQKTYIQDIYMKEVDGYLVEGSPDDYTDIKFSVKCAGMTDKIKKEVTFENFKVGFSRKMKPKPVQVPGGVVLVDDTFTIK

SEQ ID NO: 188 - protein, 575 aa, Artificial
  mutant recombinant phi29-type DNA polymerase
MKHMPRKMYSCDFETTTKVEDCRVWAYGYMNIEDHSEYKIGNSLDEFMAWVLKVQADLYFHNLKFDGAFIINWLERNGFKWSADGLPNTYNTIISRMGQWYMIDICLGYKGKRKIHTVIYDSLKKLPFPVKKIAKDFKLTVLKGDIDFHKERPVGYKITPEEYAYIKNDIQIIAEALLIQFKQGLDRMTAGSDSLKGFKDIITTKKFKKVFPTLSLGLDKEVRKAYRGGFTWLNDRFKGKEIGEGMVFDINSAYPAQMYSRLLPYGEPIVFEGKYVWDEDYPLHIQHIRCEFELKEGYIPTIQIKRSRFYKGNEYLKSSGGEIADLWLSNVDLELMKEHYDLYNVEYISGLKFKATTGLFKDFIDKWTYIKTTSYGAIKQLAKLMLNSLYGKFASNPDVTGKVPYLKENGALGFRLGEEETKDPVYTPMGVFITAWARYTTITAAQACYDRIIYCDTDSIHLTGTEIPDVIKDIVDPKKLGYWEHESTFKRAKYLRQKTYIQDIYMKEVKGYLVEGSPDDYTDIKFSVKCAGMTDKIKKEVTFENFKVGFSRKMKPKPVQVPGGVVLVDDTFTIK

SEQ ID NO: 189 - protein, 575 aa, Artificial
  mutant recombinant phi29-type DNA polymerase
MKHMPRKMYSCDFETTTKVEDCRVWAYGYMNIEDHSEYKIGNSLDEFMAWVLKVQADLYFHNLKFDGAFIINWLERNGFKWSADGLPNTYNTIISRMGQWYMIDICLGYKGKRKIHTVIYDSLKKLPFPVKKIAKDFKLTVLKGDIDIHKERPVGYKITPEEYAYIKNDIQIIAEALLIQFKQGLDRMTAGSDSLKGFKDIITTKKFKKVFPTLSLGLDKEVRKAYRGGFTWLNDRFKGKEIGEGMVFDINSAYPAQMYSRLLPYGEPIVFEGKYVWDEDYPLHIQHIRCEFELKEGYIPTIQIKRSRFYKGNEYLKSSGGEIADLWLSNVDLELMKEHYDLYNVEYISGLKFKATTGLFKDFIDKWTYIKTTSYGAIKQLAKLMLNSLYGKFASNPDVTGKVPYLKENGALGFRLGEEETKDPVYTPMGVFITAWARYTTITAAQACYDRIIYCDTDSIHLTGTEIPDVIKDIVDPKKLGYWEHESTFKRAKYLRQKTYIQDIYMKEVRGYLVEGSPDDYTDIKFSVKCAGMTDKIKKEVTFENFKVGFSRKMKPKPVQVPGGVVLVDDTFTIK

SEQ ID NO: 190 - protein, 575 aa, Artificial
  mutant recombinant phi29-type DNA polymerase
MKHMPRKMYSCDFETTTKVEDCRVWAYGYMNIEDHSEYKIGNSLDEFMAWVLKVQADLYFHNLKFDGAFIINWLERNGFKWSADGLPNTYNTIISRMGQWYMIDICLGYKGKRKIHTVIYDSLKKLPFPVKKIAKDFKLTVLKGDIDIHKERPVGYKITPEEYAYIKNDIQIIAEALLIQFKQGLDRMTAGSDSLKGFKDIITTKKFKKVFPTLSLGLDKEVRKAYRGGFTWLNDRFKGKEIGEGMVFDINSAYPAQMYSRLLPYGEPIVFEGKYVWDEDYPLHIQHIRCEFELKEGYIPTIQIKRSRFYKGNEYLKSSGGEIADLWLSNVDLELMKEHYDLYNVEYISGLKFKATTGLFKDFIDKWTYIKTTSYGAIKQLAKLMLNSLYGKFASNPDVTGKVPYLKENGALGFRLGEEETKDPVYTPMGVFITAWARYTTITAAQACYDRIIYCDTDSIHLTGTEIPDVIKDIVDPKKLGYWEHESTFKRAKYLRQKTYIQDIYMKEVHGYLVEGSPDDYTDIKFSVKCAGMTDKIKKEVTFENFKVGFSRKMKPKPVQVPGGVVLVDDTFTIK

SEQ ID NO: 191 - protein, 575 aa, Artificial
  mutant recombinant phi29-type DNA polymerase
MKHMPRKMYSCDFETTTKVEDCRVWAYGYMNIEDHSEYKIGNSLDEFMAWVLKVQADLYFHNLKFDGAFIINWLERNGFKWSADGLPNTYNTIISRMGQWYMIDICLGYKGKRKIHTVIYDSLKKLPFPVKKIAKDFKLTVLKGDIDIHKERPVGYKITPEEYAYIKNDIQIIAEALLIQFKQGLDRMTAGSDSLKGFKDIITTKKFKKVFPTLSLGLDKEVRKAYRGGFTWLNDRFKGKEIGEGMVFDINSAYPAQMYSRLLPYGEPIVFEGKYVWDEDYPLHIQHIRCEFELKEGYIPTIQIKRSRFYKGNEYLKSSGGEIADLWLSNVDLELMKEHYDLYNVEYISGLKFKATTGLFKDFIDKWTYIKTTSYGAIKQLAKLMLNSLYGKFASNPDVTGKVPYLKENGALGFRLGEEETKDPVYTPMGVFITAWARYTTITAAQACYDRIIYCDTDSIHLTGTEIPDVIKDIVDPKKLGYWEHESTFKRAKYLRQKTYIQDIYMKKVKGYLVEGSPDDYTDIKFSVKCAGMTDKIKKEVTFENFKVGFSRKMKPKPVQVPGGVVLVDDTFTIK

SEQ ID NO: 192 - protein, 613 aa, Artificial
  mutant recombinant phi29-type DNA polymerase
MKHMPRKMYSCDFETTTKVEDCRVWAYGYMNIEDHSEYKIGNSLDEFMAWVLKVQADLYFHNLKFDGAFIINWLERNGFKWSADGLPNTYNTIISRMGQWYMIDICLGYKGKRKIHTVIYDSLKKLPFPVKKIAKDFKLTVLKGDIDYHKERPVGYKITPEEYAYIKNDIQIIAEALLIQFKQGLDRMTAGSDSLKGFKDIITTKKFKKVFPTLSLGLDKEVRYAYRGGFTWLNDRFKEKEIGEGMVFDVNSAYPAQMYSRLLPYGEPIVFEGKYVWDEDYPLHIQHIRCEFELKEGYIPTIQIKRSRFYKGNEYLKSSGGEIADLWLSNVDLELMKEHYDLYNVEYISGLKFKATTGLFKDFIDKWTYIKTTSYGAIKQLAKLMLNSLYGKFASNPDVTGKVPYLKENGALGFRLGEEETKDPVYTPMGVFITAWARYTTITAAQACYDRIIYCDTDSIHLTGTEIPDVIKDIVDPKKLGYWEHESTFKRAKYLRQKTYIQDIYMKEVDGYLVEGSPDDYTDIKFSVKCAGMTDKIKKEVTFENFKVGFSRKMKPKPVQVPGGVVLVDDTFTIKGHHHHHHHHHHGGGSGGGSGGGSGLNDFFEAQKIEWHE

SEQ ID NO: 193 - protein, 613 aa, Artificial
  mutant recombinant phi29-type DNA polymerase
MKHMPRKMYSCDFETTTKVEDCRVWAYGYMNIEDHSEYKIGNSLDEFMAWVLKVQADLYFHNLKFDGAFIINWLERNGFKWSADGLPNTYNTIISRMGQWYMIDICLGYKGKRKIHTVIYDSLKKLPFPVKKIAKDFKLTVLKGDIDIHKERPVGYKITPEEYAYIKNDIQIIAEALLIQFKQGLDRMTAGSDSLKGFKDIITTKKFKKVFPTLSLGLDKEVRKAYRGGFTWLNDRFKGKEIGEGMVFDINSAYPAQMYSRLLPYGEPIVFEGKYVWDEDYPLHIQHIRCEFELKEGYIPTIQIKRSRFYKGNEYLKSSGGEIADLWLSNVDLELMKEHYDLYNVEYISGLKFKATTGLFKDFIDKWTYIKTTSYGAIKQLAKLMLNSLYGKFASNPDVTGKVPYLKENGALGFRLGEEETKDPVYTPMGVFITAWARYTTITAAQACYDRIIYCDTDSIHLTGTEIPDVIKDIVDPKKLGYWEHESTFKRAKYLRQKTYIQDIYMKEVKGYLVEGSPDDYTDIKFSVKCAGMTDKIKKEVTFENFKVGFSRKMKPKPVQVPGGVVLVDDTFTIKGHHHHHHHHHHGGGSGGGSGGGSGLNDFFEAQKIEWHE

SEQ ID NO: 194 - DNA, 76 bp, Artificial
  synthetic oligonucleotide primer
acgacgttgacaataatacaagtccgatacatgataattaccgataagttcgtcgagagcacattaggctggctgg

SEQ ID NO: 195 - DNA, 55 bp, Artificial
  synthetic oligonucleotide primer
ccagccagcctaatgtgctctcgacgaacttatcggtaattatcatgtatcggac

SEQ ID NO: 196 - DNA, 34 bp, Artificial
  synthetic oligonucleotide
ggtgatgtagataggtggtaggtggtgtcagatc

SEQ ID NO: 197 - DNA, 54 bp, Artificial
  synthetic oligonucleotide
  misc_feature (25)..(25): n is iAmMC6T, an Int amino modified C6 dT labeled with alexa fluor 488
acgacgttgacaataatacggatcngacaccacctaccacctatctacatcacc

SEQ ID NO: 198 - DNA, 50 bp, Artificial
  synthetic oligonucleotide
tctgaggcaacagataggtctatgtagcttaagagagtaattactctctt

SEQ ID NO: 199 - DNA, 22 bp, Artificial
  synthetic oligonucleotide
gcgacctatctgttgcctcaga

SEQ ID NO: 200 - DNA, 80 bp, Artificial
  extension product of synthetic oligonucleotide
tctgaggcaacagataggtctatgtagcttaagagagtaattactctcttaagctacatagacctatcagttgcctcaga
